United States Patent Application Publication US 2025/0295137 A1 - sequence listing, part 19

SEQ ID NO: 19 - DNA, 1914949 bp, Latilactobacillus sakei
  source 1..1914949: mol_type = genomic DNA
agcacgctttttttattgcttagtcacacttcttataacgtgttcattcaacctgatttctgtgctttgcaacacttgtcaaactagcgattgcatcgctaattcaccaatttaagtaaatgctcaaaaccactcagttgaagtcacacttcttatttaaccactttcaataccgattggatcatttcttcatatgcgattgggcctttgtacatccagcttgatgatttgtcatagctgtagagttgcttattcttaacggctttgacattttgccagatcggttccttaaacatagcagccccgcggtcgctgttaactaggaaaatatagtcggcatctaattcggttagtttttctaaagaaacgggcatccagtcggcggttgcgtttttagaaattgttttaaccaactcaggttcttttaaaccgagatcttgatagaggagcgcgccacttgcggcgtgatcattgaccatgaaggctgagttatttgtaacccataaaacagcggctgatttattcggcgcttttgtttggattgttttcttggcgctagctagtttttggtcatagtcttttaaaacggcttgccccttatcttctttgttaacagctttggcgacatcttttaattgggtgcgccatttgactttagcgccatttttgacaacgtaggttggtgctagtttgttgtattgagcatatttaccaccttgaacagcactgttgtcacccactaaaatcagatcgggtttagctttagcaactgcttcaaatggtaaatcgtagttgatagtggggacgttttttaagtattttgcgaggtagtcttggcgactggtcccatttttgacagaccattgcacgactggtttgatatccagcgaaataagataatcttctagatatgaaccaataacacgtttggggtgtgtgggaacgcttaccttatggtccatactatcggctatggttcgagtttgtttcttagtggctgttttggcttggcaaccagctaagatgattaatgacgttaatcctaaaatggcaataaaacgacttgactttttcatgagtttcctccaaaaatataattgagaactattctcattatcgaatgtttacagtgtaactgtcaagttgtttcggaattttgatattgttttctcatataagattgttatctgagaaatgttttcttataatatgtaagagccgttaatccggcgaaaggtgagcggaattatggcaattttagaaacacaacaggttagtgtcggttataatcgacgcttaattattcaggatttatcaattcaaattcctcaagggcagattacaaccttgatcggacctaacgggagtggtaagtcaactttgatacggacgttagcccatttgttgaaaccgtcttcagggacggttctgctggcagatcaggcgctagcgactaagacgcctaaagagatggcccaagaaatggcgttattaccgcaagttggggaattaacgaccgatttgtctgtctttgatttagtatcgtttggacggctgccttaccggcaacaattcagacccttgtcagcggtcgataaagaaaaaattgagtgggcaattgaacgaacggggcttaatcaatttagagaccgtttcttgagtaccttgtcaggcgggcaacgccaacgtgcttggattgcgatggctttggcgcaagacacagatattttaatattggatgaaccaaccacttatttagatttgacccaccaactagaaattatgttattaattcaggaattaaatcagattgaaggccgcgccattatcatggcgttgcatgatttaaaccatgcggcccgtttttcagatcagttgattgccttaaagaatggtcaattacaggccagtgggacagtcaatgaggtcatgacgcgtgataatttacgacacatctttaatattgatgcgacgttaatcgaacatgatcagcgtcccttaatcctaacttatgatcgctggtcagaaggggaacaggaccatgatgaataaaaaattcggcttttctttagtgattagtttgattctgttagccattctgatggttgtcagcattcgctatggtgcggcacaaacaacgatgaagacggtctatcatgcggtttttgattatcacgcaagtcaattacaacaagctgtgattcatgaaattcggttaccacgggttttaggcgccgctttaataggcgctagtttggcgggtagtggcctgattatgcaggaactaacgcaaaatccattagccgattctggcttattaggcattaacgcaggtgcagggttcatgttaacaatcagctttatcgtgttacctaaagcgacaccgcaacaaactgctatttttgccttaatcggggccgcactgtcagcctgtttaatcttagcaattagtatggctaaaaagacgcagaaaacgacgacggtagttttagccgggatggcgattagtagctgtctggttgctttaagcgaaggcctttctttaatgatccagcttaaacgggatttagcgttttggcattttgggggcgtcgcggcgattacgtggacgcaattaacgcaactaggaccatggttaattgctggcttgattgcaagcctctgtttggcaccgcaactacgtttattacaactaggtgatgaacttgtattaagtttaggtcgcaagacgagtgtcgtgcggttattgggctttatctgtgtcattattttagcgggtatttcagtggccttagttgggtctgtcgcttttgtcggcttgatggtcccacacattacacgttatctagttggttacgatgtgcgtaaggtgatgccagtcacgttattattaggggccagtctggttgtggcagcggatttgatttcgcggacgattaatccaccacaagagattccctttggcattatgattgccttaattggcgtgccattcttcatttatctagcgagaaaaggggcgagtcaagcatgaatatgatgacaaaacgttatcggcgttggctcgtcgggttgtcggctttgttaattgcaacgaccctggttagcttacaaacaggccaattagcgattggtccacaagcaatcggccagttattgattggtcagggtcaagcgcaagatgcgttaatcttagttgattttcggatgccacggattattattgcaatcttagtgggctttgcgttagcgattgcgggtgaagtattacagagtacgacgcaaaatccattggcagacaccggctttttaggaattaattcgggtgcgggaattgcggttttattatttattacatttgccgccgatcaaggtagtcagatttttatattaccggtattagctttgattggtgcgttagtcagcgctgtagtaatcgtgattggcgcgtatcaaaagtctgtggggattacggccaatcgcctattactaaccggagtcgcggtttcgacctgtttttctgcattaatggtcttattgaccttgaagttatctcctgataattatcaatttgtgatgacttggctagcagggagtatctgggggagcagctggccatttatctgggcgctgttgccatggttgttattaacactgccttatattttcagtaagagtcaaaccttggatgcctttgttttaaaacctgataacatgcgttcattgggagttgattttcaaaagcaacggttgtacttgattggcgctgcggtgatcttggcgggtgctagtgtttcaattagtggtgggattggctttatcgggttgattacaccgcatattgcccgcagaattatcgggtatcagcaccgctatcaattactattaacgggacttttgggcagttgctttttattggttgccgatacttgtggcaagctattgagccctactgccgaaataccggccggcattattgtggccttaatcggtgccccttactttatttacttactaatcaaaacgaaatgagaggagtatgaccgcaatgactaacatttacgagacaacgattattggtggtggcccagctggtttgtatgctgcttttcaagctggtttatacggtttaaacggccaattattggaaggggatcaacaatttggtggcaaggttgccacttatgcggagcgtgtgattcacgatattggcgggatgcccaacattacgggccaggatttaattcagaatctaacagcgcaggccgctttttatgacacacctttgcgcactcaaaccttagtgacagacgtcaaatatttagccgaccaagattattatcaaattgatacgccggatgatcggtattatagtcaaaccttgattttagcgatgggtggtggcgtggtccggcctaagcaattacggttgtttgaggaacaaacttttgaaaacgtccattatgcaccagccaaccctgaggattatcgggatcaacgggtggtcttaattggccctgggtataactggatggaattggcgccgcatttgttagcgactgctaaatcagtggtgtggttaacgaccaagcgcccctttgtggatgaagcagctgaaaaagcgttcttaaccgcttatccacagattgactattactgccagccttttgcaagttatcaacaggtagatcaacaagtgacgagcatcacgttggcggatcaaacgcagattacatttgatcaagccgtggtcagtcttggctaccgccggtcattacagacgattgatcagtggcagttaagcgcagaacagattgaagaacgcccagatatttgggtgattggtaatcaaattccggatcgtgctgggattagcttgttaacaagtgcttttcaagatgggattacggcgataactgagattgttgcccaacttaaaccaacagctaaaacaccgatggtcacgacgcataatccagttttccaggcggatacaaaagcctattggcaagaacgattacgatagatgggataataaaaaaaggatctgatgcaaacttggcatcaggtccttttgaacatatttaatgttttttacgacggtgtaactcttggcggctagggagattagccacactgctaaaggaagctttagcgaccggttcatgttccggttcaggtgttggttcagtagtgactggtgtcactggttctgctggttcagtgggggaaattggtgtgacttcaggcgattgcatggtcaccattgcttctgtttcaagcgggatttcaatcggatcatttgtatccgtttgaacaaaaatagtaactcgttttttattttcaacggttgccttagcttcagcagtgacttgtaattgttgctcaagggtttgggctataaaaccggcttcgagttggaagtcgggtgttttgaaatcggctagtcgcttagtgataatcggaccagtgagttcaaaaaagtattggtttttcttttgctttttaagcgataattggccaaagttaatttgttcgaagaattgactgagatccgcaattgattccaacggaaatttagtagctaattgcttaccagcccaataactaatgccttcagtttcatcacctaaaataagcggtaataagatatcgcggagcgtggcttgggctaggtaagtagcggtttgaggggtatctgtgagttgtgtgtaaagtgattgagtcacgacggtgctcctttttaataacattttttaattaagatagttgtattataccgcgaaatcagattattttttagtatttaaagggtagtcggttgaattttaggtaaaaaaaagagaaaatagagtttacgaatgcattttgtgatgaaaagagaaagactactatgaagaaacaaccaattggttttatggattccggtgttggcggtttgacgctagtcaaagaagcccgcaaacgcctcccaaatgaagacatggtgtttattggtgatcaagcacgattaccttacggcgaaaagccggctgccacagtacgcgaatttgcttggcagatggctaatttcttacgccatcaagagattaaggcgctagtgattgcctgtaatacagcaaccgctgcggccttacctgacttacaagcccaattggcgattccggtgattggggttatcaaaccaggtagtattgcggccctacaaacgacgcataatcgacgtgtcggggtgattgcaacaactggcacaattcaaagtgcggcttacagtcaacaaatggcagcccttaatcctgatgtgcaagtgactggattagcagcaccgcagtttgtgacgatgattgaagccaaccaacgacacggtcaagcagtgcaaaccatcgtcaatcagattttacaacctttacaaaaaagtgagattgatacgcttgttttaggctgtacgcattttccattattgacgaccgccattcaaacggtagtggggcctgacgtgacgttggttaacccagcagtccaagcgattacgatgttagaagaagtcttgacgcaacaacaacaattggcgacaaccacgccagggacgctacggatgtacacaacaggctctgtcgccgcttttgaagagattgcgcaacaatggcttgcccaaccagatttaacagcacaacaagttgatattcaaaaggagaaaaatgatggtccggaccgataatcgagcagcaaatgatgtacgccctgtcaaagtacagtggcattatctgacgaaacaacccgcttctgtcttatggcaacgcgggacaaccaaagtattagcagctgtcagtgagcaagcaactaagaaagtcacgctaattggcagtggcttgacgcaagtgcaaagtgactggttacaacagacgctaaccactttgttagcgcccgctttggaaaagacggggttactggtgtcagtgacggttttagaagacggtggtagtttactagcagaagctagcaatgccgtttttggggccttgcaattattacctgaacaattcttacctaatcgtgcagcagccgttacggctattctgaccggtaacgaaacattagtggatgccagtgacacggaagaagcggttgctgatagcacgttgttagtcgtgaccgataatcaagaacaaattttagcgatgacgttacaaggcgcaacggcggttaacagcagtcagttaaacgaattgttattggtcgctagccaaggcggtacacggactgctgaacagattcaagcgagttatcaacaagctgtccacccaatcattcaaaaggagcactctgagatgccaacaattgtgattgccactaaaaacccgggcaaggcccaagaattccatgcgatgtttgaaaaagaggggatccaaattaaaacgttattggattaccctgaattaccagaaattaatgaaaccggtcaaacctttgaagaaaacgctcgtttaaaggctgatcagattgctgctattttacagctccccgttttggcagatgattcaggcttaatggtcgatgccttagatggtcgtcctggcatttattcagcccgttttgcgggtgatcataacgatgccggcaataatgccaagttattatacgaattaacgggcgtccctgctgaaaaacggacagcccatttccatacaacgttagtgtttgcgaaacctgatcggcctgacgatgatttagtggttgaaggtagtgttaacggtcggattctaggaattccccgtggcgataacggctttggttacgatccgttgttttacgtaccagaactagataaatcaatggccgaattatcgatggccgagaaaaatgcgattagccatcgtgcaaaagcgattgaaaatttagaaccactttggcgtgattggttggcaaaataggaggaattaagatgcggttagtagtagtcagtgatagtcatggcgatcgggatattttggtgcaattggttgcgcattataaggatgaagcagtcactttcttacattgtggtgattccgaattaacgacgaccgattcattatttcaacaaatgacggttgtgcaaggtaatatggattttaatggccacttcccagaacaagtggtggtgccagttggggcgcaaaaggcctttttaacgcatggtcatttgtacggtgttaattttgatttaacgcggttgatgttagcggctcaagcagaaggcgcgcaattggctttttacgggcacacacatcagttagcctgtgaaatgcaccaagggctcttggtattaaatccgggcagtatttcgcaaccgcggggccaattccaacccttaggtggcacatatgctgttgtggatatcacggcgactgactatcaagtccaatattatgaccgccattttgaaaaagtaccacaactccaatttaaatttaaaagagcttaaagttaaagactatccaaagtttagacgctgtggatagtctttttagttagtggtttggtacaatattaaacgtaggtaattagaaggaggacactgcatgatttcagatgcgtttcagaatttattactcgaaaacaaagaacattttttaattcctggtgaaatggtcgctagcgttcaggaaaataactcgttagaacatgcgtttattctcttaacaactgttaaatattcaagtattccggtgctcgataatcattcgaagtttaaagggatgctaaccatgccactgattacagagacgatgttaggactcgatcacttgagtttcgataacctccgtaaaatgaccgttcaagatgtgatgcaaaaggatgttgtgacaattaaagatccgtacgatattgaagaaacacttcatttattggttgatcatccttacttaccggtattatcagacgacggcgaattcacagggattgtgactcggcgcgagatgatgaagagttttaaccgggtagcccataatattgaaaaagaatataagattgaggctttaccaatagagaaacaacaaaattagtttattttagcgcattaaaaaagcgttgcgccaaaagttattttgtcgtaacgctttttttgatagctaaaatatgctttttgaaactgccttctgcgtttagcgttactcgtcaaacaactgcttgcagcagttattcgccgagctgtgctaatgctcaaagccaaagcgtttcaaacgcactctttaggcccgatcgaagtaaatcgttgcaatggctcctaagacgagcatcaaggcgattaatgcgattggccctagtagtgcggttaaaccacccacggccggccaagcgggtacaacgcccgtttcagctaggatccagatggctgctaggatcacgcctaaaacgccagcataaacatattgggcatagtgagcgagtaagtaatgcatgattttagcgacaatcacggtcccaatcacagcacctagcataaatggcaagaggagggcgacacttttgaaagcctcgcctgcctgttcaaagcggccggtaacgagataaacgagcaaatcgagtaattggctaacggcgtgatagacagtcccgtattgcttgataatcatcaacataatcgaacccgaaataccgggaatcaccatcaatgaaacggagaaaaagccggtaaaggttaacatcccgaaatcttggagggacgttagttgtttgatggcaatgtcagattcgttttgatgaccaccaattttggtaatcaataacatcaagccaccacaggcaatggcaattaagacttgctgccagtttagctttttaagcttgcgccagatgaacggtaaactgcctaaaacgaggccgatgaagaaactataagcggccagtggataagcggtgcataaccataaaataactttggtcgataataaaacaccgatgcccgcgccaataccgattggccataaaaagccaattgcttggcgccaatcttgtttgaactgcgcgatggcctttaataatggttcatataaaccaacgatgacggcaaagatactaccagataaaccaggaataacgagtgcgacaccgatgagggcgcctttgagtgcattaattagtggcataagagtgctcctttggcggataatttagttggttaaagtcaatgaactggtgggtaaggtaatcccagcggcgttaatcgcctgtaagtaaccttgtaggaataaacgttgcgtcgttgcttgttcgccgttaagcgtgtgcatcaccacttggtaggcaagtgtgccatccgttaaggttgaaacccccagtaatgtggggccgtctttgatttcgggatggcgcggcactaattcagtgttgacttgcttaacgattgttgcgagttgttcgatatccgtatcagggttgatacgaatattaatcagtacccgcatattgttgcgggaaagattgctgacgattgaaatgttccggttggggatgaaattgagcgtgccatcgtagctttgcacttgtgtggttcgcaagccgatcgctgtaacagtaccttcaatcgttccaattcggacggtattgccaacgtcaaattgctgttcggccaggatgaaaaagccggtgacaatatcgttgacgaatccttgggcaccaagaccaacggctaaactgaagatcccagcaccggcaattaatgtcccgactggaacgccgataatgctgagcagtgcataaaggtaaaagaaaattagcagataagccaaagcgttggtcatcagggtatagatggtattcattcgattgttggaaaaaccatctgcttcgcgatatttgcgaaaggcccgtttgataataaaacgcccaatgcgactaagcaagtaaaaaagtagtgaaattaaaatgatttgaaaaaagcccgtgatgaagaggcctaagaggtgatcccaatcgatgctggttatatagcgcataaagatattggtttgcttttgaaccgactcgacgggtgtggtggttagtgattgaaagaacatgctgacaaactcctttaaaagtgcataattctagtttagcaaatgtttaaaaaaatgacatctaatatagtatgattatttgaaggttgtaccgaataatgctatcctagagactgagaaacaagataatagacgacgaaataggaggaacaaattgatgacgggtggtcaaattgcagcattaatcgctgcaggggcttttgcagttttggttgtttttctaatagtgatgttattaaaagtcactaaggttttaacgcgtgtttccgagacagtcaccgaagccaataagagcgtgacaacaattacgaatgatgtagatgtcctttcaagacaagttgaaggtctgttgaacaaaacgaatgttttactagacgatgtcaacggtaaagtagcagatttagatccagttttccgtgcagccggcgaattaggcgagagtgtttcaagtttgaatgctgccagtcgtggtttgactgaaaaagtaacaagtgtcggtcgcacgaccgccaaagcaacagttgcttctaaaatgggggccagtgcccttagattctatcaaaatagacgacaaacaaaagacaaggagtaattcacatggcaaaaaaaggctttttattcggtgttttagtgggcggcgcagcagcaattggtgccacacttttattaacacctaaaacgggtaaagaattacaaaataaattagtggacttgggtgaagatgccattgatcgcgcacaagactattattacttgatgaacgaaacggctgctgatcttaaaggagaagcaaagttccatatgaaccgtgtgcacgattatgcgagtgattggcaagaaaatgcattggatatcaaagaacaggctaaagcgcaatttgatgaaaagacggcagacttaaaatcacaatttggtagtagtttagaaccagctgctgaagattttgatgatatcgtcattgaaggcaagagtgcttttggccaagccaaagatgaagcagaagaaaaaataataccagattcattaggtgaataaaggattgttaaaaagccctcactgatagtgagggctttttaatttggaggggggattaattgcaacaacttccgcttaatctaaaatgagccataatcttaaaaccaagattatgactcattttgtattaatgctcagttgctagacacaattaagggcactcttatttgaaacgtgcttcttcgaactgccttttccggttaacaaaaaacgcgaatcatgaccaagggcgtcataatccgcgtttttaagttaatcctcaaagtcaattcgttcgaatcagcactcttacttgaaacgtgcttcagcaggcatatttctgcggctagctacgtccgttaaacgaccaacaagttggtcattcaccagactaggctagtcctcaaaatataaccgcctgcttacgcactcttagaatgtttgtagttcttttgtcatgtgtgtgaatgattctgcgcctgtttctgtaacgtggacacagtcttcaatccggacaccggcaacacctgggatgtaaatccctggttcgattgagaagcacatgcctggtttgataatcatgtcgttaccttccatgattgatgggaattcgtgttctgaagtcccaatcccatgacctaaacggtgaataaagtattcgccataaccgtccttcgtaatcacgtcgcgggcaatcttatctaattcagcagctgtaatgccgggtttaacagcatcttgtgcagctaagtttgcttcaagacaaactttgtggatttcaagtgacttagcatctggtttaccaaaagcaacagtccgtgtcgcatcactcatataacctttgtgtaatgtcccaagatcaaagagcactaatgcatcaggtgttaagatattagcttctgggccaccatgtgggttagcagcgttgatgcctgattgtacaattgtatcgaaactcatatgcataacgcctttacgcattaaagcatattcgatttcagcaacgatgtcttgttctgttttgccagcttttaaagcgttgaaaccaacttcaaaggcgtagtcagcttcgcggccggctgcttccattaaagcaatttcttcaggtgttttgattaattttaagttttccatgaagcgtgatgcatcaccagggaatgttgcgttagggaattgctttagaattgcttcataacgttgaacgggaaggtcgtctttttcaagagcccaacgtgttggattggccatccgtttcttgatttgatctgcgatgatggcatatggatcttcatgatcaaggtaaccataaacatcaagtttccagccagccttcttagcagattcaacttctagttgtggtgtaaataggaatgggtcctgatctgcaaaaacaaagagggctaaaacccgttctgcaggatcactttcaaaaccagtgaaatagaggatgttcgttggattactaatgtaagccacatccatattattctcgacaagccaattttgtaattgggctaattgattattcatctaaagcacttcctttacagttgataatcacagtatagcacagaaaatgtaaacgttaatgtaaactgcaaatgaaaacaaaaatgaaaatttcataaaaatgatgtaaaccgcttgcatttgccttaaatatctgttaaattaatcaagaagtgaaatgaaaacaaatgaaaatacaatatattttattttgcgaatgaaaggaatcattttaaaatggaaaaacaaacaattacaatttacgacgttgcgcgtgaagctgacgtatcaatggcgaccgtctcacgggttgttaacgggaaccccaacgttaagcctgccactcgcaagaaagtgcttgaagtgatcgaccgtttagactatcgtcctaatgctgttgctcgtggtttggcaagtaagaaaacaacaactgttggggttattatcccagacgttagtgatatctactttgcttcattagcacgcgggattgatgatgttgctacaatgtacaagtacaacatcattttagcgaactcagatgaaaacaaccaaaaggaagttcaagtattgaataccttattggcaaaacaagtggatggtttaatctacatgggtcacagtatctcagatgcaatccgtgctgaattcgcccgttctaagacaccaatcgtattagctggttcaatcgatccagacgaacaagtcggtagtgttaatattgactacgttgcagccgttaaggacgcaactttgaagttaatcaagaacggtaacgaaaaagtcgccttcatctgtggcaacttagattttccaatcaacagcaaatatcgtttacgtggctataaagatgccttgaacgaagctggtattccttatgacgaaagcttaattttcgaaacagaatacagttacagtgctggtgaagccttattcggtaaggttcaagcaactggcgcaactgctgctgttgtcagtgacgatgaattagccgtaggtgttttaaatgctgctgttgatgcaggggttaatattccaactgactttgaaattgtgacaagtaataacacgaagttaactgaaatggttcgtcctaagatgacatcaatctcacaacctttatatgatatgggtgctgttgggatgcgtctgttaacgaagatgatgaacaaagaagaaatcgatgataagacaatcctattgccatatagcattgttgatcgtcaatcaactaaataaaacaaaaacaagcggtgattacataatctgtaatcaccgcttgtttttttattctgattctgattgactagcttttgtttcaccgtacgtaattgtaccgtagccgttattataacccatataatgattccagaaggtttcgtaattgctgcttgtgccaccaattccgaattcgtattgcgttgcttctggtgtccaattattgtaaagcgaagtgaccttaccactgtcaacggttcgcgtattaccattaatggaaacaatacctggcagttgtccagttgctttaacaactttgctacttgtaacggtacttggtttttcatgatcttcttcaagcttcatgatacttggatcattttgatagacgctattggctaacttagcccaatagttttgattaatcgtgctagagctatcggttaagttacgaccagtactgtcataacccatccaagaagcaagggtaatccctggtgtgctaccgataaaccaaacatcccggttatcattattagtcccggttttaccaaccaggttattagtgttgaagtagagttgatcgctcaattgtgttgcggtcccatccgtatccgttaaaacacctgataacatttggttcatgatgtaacttgtcgccttcgagaagactcgtgttttcttagtgtgatgtttgtaaatgatattaccagcagggtcagtaatcttatcgatcacgtaagcatcaacgtgttggccttcatcggcaaatgttgtaaaggcacttgcttgggcgagcacgctaatcccatctttggttccccctaaggcaagtcccaattgactatattcatcatcagaaaggtgaatccccatcttatccatataggtcgcagggttagtcgttttacgtaacttattgtataagttaacggttgggatattgagggattgggctaaagccttatccgcagggatgaacttgttttgaatggtgttaccataatcggttggcgcataagttttgaagttagttttaaagtcagccaacatcgttttagaaccgatcagtttttgatcaatcgctggaccataaaccaagagtggtttaatggttgaacccggtgatcgtttggttaacatgtagttagtttgcttgagggagaagtcgcgacccccaacaaatgaaatgactttaccagtctggttatcaagtaagacactcccgttttgaaccggtgtgtcgcccactgattgcagaccagtaattggatcggtcgttgcatcttgataggttggtccaaaagaactgccttcttgtttgacgatttcttgcattgaatcatagatatctttgtcaattgtactatggatttgatagcccttagtacttaagagttcagttgcctttgtttcatattgtttgtagagcgttgggctactattaagcttttcagtcgaaacattagcttcattagcgagttgtttcgtcatgatgtcggttgcttgtgattccaaaaggttataaacgtaaccataatgcttagaagttgattcaggttctgctttagcttggaattcactcgttaaatcgacttttttagcagctttgtattctgctttggtaatgcggtcatcacgatacatccggaataaaacggtattcttacggtctagtccgtatttcaagtattcaggatctttcaaggtaccatcttggtcatatggtgtatagacggaagggctctgcggaagaccggcaatataggcggcttcggctaaagataagttcttagcatctttaccgaataacccttgagcggcttcttgtacaccagcaacgttttggcctttattgtttcgaccgagggttgcaatgttgaggtagtcttgtaagatttcctttttcgtgaagtatttatcgacacgtaaagcaagtaagacttcagtcgctttccgtttgaaggttacttgagatgttaagacctgcatcttaattaactgttgcgttaaagtcgaaccaccggtttgagaaccaaagccggttaaatcagagatgacagctcgtaagagggcctttggaacgaccccttgatgtttatagaagtcttcatcttcagttgcgacaatcgcatcggttagataaggcgacatctcattgatgctgacgggtgtccgcgagagatcagtcttaattgcgccgaattttgtgttcttggcaaagtaaaggccggccgcttgatcagtgttatcaagttgttgtttaagcacttgataacttgggaccggttcatccttcatcaatgcggcaaagtagccggcaccaatcccaagacctaaggcaaacataatcaaaccgattgaaatgccgtagaggattaaacttttaagtgcttctaaaaagacattaagcttaaaagtgaggggtttggcactaaattgatcgacaaatgttcgattttggtctttgtcttgatgtttaaaccaattgttaagccaaggcattgaatgtgataatttcgttttaatcttggaaaatagcgtattgactttgcgacgccctttagagatgagggctgatgcgtgcttttgccgttggctggaacgctgctttgaatctttcaaataataacgccaccttttttctcatactgtccaatattatataatagtttttctgaatattatacctgtatttaaatttgtaaggtaaatgaaaaatatgaaatcgccagaccaatcaataattgatagctaattagcacggtagtggaaacgctaactggtaggtataccaatatttagacatagaattaaatttaaaatgcttgcaaatgaaaggggcctgctttataattggactataccaatggttctttgaattctaaattatgaggagactatcacgatgaaaattattaaagtaaaagatcaagtagaaggcggccaaaaaggctttgaaatcttcaaagaaggtttagcaaacgacgcgaaagtattcggtttggcaactggtagttcaccaatcaaattctacgaaacagttgttgcaagtgacttagatttcacaaactgtacatcagttaacttggatgaatatgttggcttatcagctgataacagccaaagttaccactatttcatgaaagaaaatctatttaataagaaaccatttgcaaaatcatacttaccaaacggtttggcaagtgatattcctgctgaattaaaacgttatgaccaagtcattgctgataacccagtagacatccaaattcttggtatcggccaaaatggtcacatcggttttaacgaaccaggtgctgcttttgacagcaacacacaagaagtgcaattgacagaatcaacaattaaggctaacgctcgtttcttcgaaaacgaagcagacgtgccaacaaaagcaatctcaatgggcattggctcaatcttaaaggctaagaagatcgtcttattcgcatacggcgaatcaaaagctgaagccatcaaaggcacagtagaaggcccacaaacaacagacgttccagcaagtgctttacaactacacgacgacgtgacaatcatcgtggacgaagcagcagcaagcttgttatcaaaatagagtgcgtttgaaacggttatcttctgagcattaactggatttgacgaattgacgatgaaatcgtcgatttggcaaatttggttaagcgcaggaagatgtttcaaaaagcacgtttccacacaaaaagcccccacatccaaatcaagatgtgggggctttttgtaatgctattatttcaacgttgtcatcacttttgccattgcggcttgttgataggccatcgctgcttttttagcaactgcttgtcgttgcgttgcagtcattgctggattagcttgcatggctgccatcacagcttgtttaccggcgttagttgcgcccgctttgagttgtgcttgttgacgctttaatgttttagcgagttgtttagcttgagcgtcgcttaaaacgagccagcccttagcaactttgaaggtattgtggcggctcacgaattcgtggtcattgccagaaataccaaaccagaatttagccatgtcatttttatacacacggtatttggtagtggttactaaggcagccttatcagcattcttttgaacgctgttggttgtcttttcagtttgggttgctttaggtttactttggtggctatcagtccgataaaggtaaactttttcggtaccattgccaagtgggtgatagagcaacattgacatgcccttagcatcggcacttgaaacaagggtttgtgtcttagtttcggtcacagttttcatgccataatgattgtgatcattttgaacgatgaaaaagagtgatgcgataaaagtgagaccgaaaatggtcattaaaattgggcgccacattttttgaccgaagattgaagcaaagaataacgcaagtgtactaataatgagtgtaataacgatcatgctttggcacctccattagtagttgatttcttagaggagaggaagaatgtgataatgaagccgatcacacagaaaatcacggcgacgataaaggcggcgtggtaacctgaaagggttgcattaatcattttatcacggaaggccaatggtaaggtcttgaccatgtgtgtgcttggcatattgtttttggtaacacttgaaagcacactgattaagatggctgtcccgattgagctggcaacttgccggaaagtattattaacagctgtcccatgactgattaagttcattggtaaagcattcatcccagaagttgtaacgggcatcatcaccattgaaatcccaaacatccgaacggcatataaaacgacgatgtagatgattggtgtcttagcagttaagaagataaatggtgcagtagcagccattaataagaacatcccggtcatggccaaacgttttgcgccgtacttatcaaaaatacgacccgtaattggcatcataatccccatcatgagggaaccagctaataaggttaaaccagagtggaaggcagattcgccacgaatattttgaatatataatggtaagaccatttcggcaccgaccatcgccatgtttgtcacaccacttaaaatagcggcaattgtgaaaacgggtgatttgaagacgcgtagttccaagaatggattttccattgtgagttgacgccaaacaaagagggcaattacgatgacgccgactgccaaggtagcaaggacaagcgtgtcgccccaacctttatccccaacttcagagaagccatagagtaaactaccaaagccgacggttgataaaataatagaaggaatatcaattttaggtttcgaaagttggataacgctcttcatttggaagctcgctagcactaagacgagtaggacgattggaataatcattccgaataagacccgccagttgtatgaatcaataatccaacctgaaagagtaggtcctaaggcaggtgcaagaccgataacgatcccggccatccccatggctgtaccccgtttttcaggtgggaaaattgtgagcataatggtttgcaagatgggcattgaaatcccaacaccggcggcttgaataagacggccgattaataaagttgcaaatgagctcgttggtgcgatgtaacaaataatggtcccaagtaaaaagacagtcattgctgacatgtagaggacctttgaattgaatcggttaattaaccaagcactaatggggatcataatcccgttgactagcaagaaaccggttgtgagccattgaacggctgaagtggacacgtcaaatgctttcattaatgtggggaaagcagttgataaaatcgtctggtttaagacagtacaaaaagtaccaatcaataagaccaagactaaggctgtccggttgtatggtttcccatgaatatctaatggtctagagtctgacaagataaaaatctcctttacgttttgttgatgcgatttattagtttagtcgcattttcagtctttgtcaagtaagttgacaaagatgtcattcgacttgacaagttttgtagataatctataatgaaatttattaataggaacggagtggggacttgcaaaaagacctttttttaaagttgatagatacggatcgattaatttttgggattagtgaagtttgtaagatggctggggtgacaccgcgtcaactccgctactgggaacaaaagggctacattaaggcccgcgaagtagacggcaataaggcccgtgagtacgacgctcaaatgatgattaaggccattttcatcaagcatttcttagatgaagggtatacgttgagcgtggcggtccaaaaaattcaaaagcacatggctaatatgaagattgtgcgatcgattattcgggaacatttcgaagggattgaagaactagatggcgaaatggctgtgaacctcgggtatttcgatgatacaaaacaacagattttatatgcgattgtcaaagaagggcattcaacctttaaattagtggatgcccctacaaaagaataagaagcaaaagtgattgctaggactcgggcaattgggtcctaacaatcacttttttattgtctaaaaattcagtacgcatcatttgaaacgacttaatgtgtcgggtcggctgtttataataacgttattaatttaaacataggggctgattactgatggaaaaacgacaatatttgcagtttatcaacgaagggtacggctttgaattttatttgaatctcgtcggctttgtcgcagattttaacggcagctatccaactgaacgggaatttaaaacgatccttgaagaaaatggtgtggcttatacggcgattagacggcataaactcaaacaaatgtatcctgagatgtttgcgaagcaacatcagggacatgaagacgctaagcaatatcaatttgatttggatcatcaggaattaggtgttcagcgagtgtattatgcttatagccaacctgaattggttgatgaacagggagcaacatgtctgacgacgacaacgccgacttttgtcacgcggcaaccacggtatcgccttttcgataacagcggtcagtattatctttttgatgtgccccaagatcaatttgaacaacagttaaatgcactgcctacggaggtgctcgattttgaacaaccacatgttgctggaattttaatgttgatcgagcaggttaaacaattggggtatacggtagtgggctatcatctaagtcacatagaatcttatccggtcgtcgaaccggcgctcctcacggcacttatcaaccatcagcaagagacgcaccaacccacttttgagccaatcaacgacttgcttaatattaaaacggattatcgtagtttgttgtgttacgacgatcagttgaaaataccggttttcaataaagaatcaagtcaacagttcgggcgggatgacaatctgtatttcaagattcgggatgcagcggggcaagtcgtctttgaccgtttgacgttggatatccttggcacgattttattttgtgtggggcaacagttaccactcgaacagattcaagccgcttttttaacggatccaaaagcgtcatttaaagcgggggaggactactttatgtatgatcgattggcttgctcggctgaagtgccaattgaaaccttaactgatattaaaaaggtggcactgtgctcagtagatacaacgcaaacgattagtgaatattggcggtggtcgccacgtgatttaatgcgttatggcaaggccattgcaccggcggactttggccaaccagcaccggcagcagccctcatgctggcatttaatcaacaattgactagcgcgttgcgtcgtattttgaagcaatcagctttgcaggttcgaaaagtcacgcgccaatttttagtactagaagacgttgttaatgttgatttagcgcttgaagatagtcaatcggaagaggcattgagcgcggcacaacagatttatgctagccagatgaagacagcggcagaaacgcgctatgatttgctagtcgatggtcaatgtgtcttgcaggaagttccattagacgaattattaccggccattatggaatttgctaatgaataacagtataaaaaagagacgaccaatgttggtcgtctctttttagtgcatttaaattagttttaacgtgttaaacgataaattgcgtctgcatagatggcaattgcgttcatgatatcttcgatatgcatgtattcatttgcttgatgcataacattttcgcgttcttctggtaaagcaccgaaagcaacaccacgttctaagatccgaccgtatgtgccaccaccgataacttgttcgtgacctttaagacctgtttgatcttcaaagacttgtaataaagtggctactaattcgtcatcaccaggaacataatgaggtgcttgtgcatggccttcgattgttacgtcggcaacatcactaagtgtcttagcaaggccttcgcgtgtgctttcatcagttacacctttagggtagcgaacgttcaagagaacagatgcaacaccgtcttgtgtgtagttgaagacagcaggacaagctgttaaatcacccatcacatcgtctgtatggttgatgtttaagaggtgaccacgtgagtcttcgtgcattaagcgcgcgattgtaccgatgtagttgccacctttagcgtctaatgcaaagtcagctaagaatgttgccaagtgagttgcagcatttacgccagctttaggttcttgggcatgtgagcctttaccgattaaatcgattactgtttggtcaccatcagttgtgatagtaccttgtagtttgtgttcagctacataagcatcgaatttagcttggaaatcagctggcattgcaccagttaagattgccttagcagtttgaggaaccatgttagcacgtaaaccagacttgaagcttaccaatgtcatttcaccatcagcgccatcaactggtttgaaagtgatcatgtatgacacaattcctttttcaccattgatgattgggaagttagcatctggagagatagcaaaatcaggttttggttcaacttctagataacggttgataccaacccattcactttcttcgtcagtcccgaaaatgaagtggacttttttgtttaatttaatatcgttgtcttttaataatttaagcgcatagtatgctgcaattgatgggcctttgtcatctgaagaaccacgggcataaatcttgccgtctttgataactggttcaaaaggatttgtttcccaaccgtcaccagcaggaaccacgtcaacgtgacctaagataccaaaaatttcgtcgccactaccaaattcaatccggccagcaacgttttcgatgtttttagttgtaaaaccgtcacgatcagcaattgctaacatttgtagcaaagcatcacgagggccagggccaagcggtgcatcgtcttctttatgttcaacgtcacgcgcgctattaatcttgagtaaacttgttaagtcggtaagcatttgatccttatactttgccgcttcttgttgccaattcaatgtcattgcagtcccagctttctttgttaaattttaaccaaggtgcggttaatctaaaattaggataacctcattctagcatatctgctcacaattaaaaagcgctccctactaaaaaagaacggccgttaacaattacttttaacggtcgttcttttattaatgtatctattatgtgaaactaatctcaaatatgaattagttcgattttctcataatacgcaaggcatttaaaatggcaattagggttacgccaacgtctgcaaaaacggcttcccacatggttgcaatgccaaatgcacctagtaataagaagattgctttaacgatgagcgcaaaagcaatgttttgccagacgattttgcgggtgaaacgggcaatatcgatggcagttgctaatttagttggttcatcggacatcaaaacgatgtcggctgcttcaatcgcagcgtcggaacctaaaccgcccatcgcaacaccgacatcggctcgagcaagaacgggggtatcattaatcccgtcaccaacgaaggccaccttgccgttttgcgcacggttatcagtcaggctggctaaagtagccactttgtcttgaggaagtagttcactttgataatgatcaattcccaaagattggctgacttgtttagcgattgcgtcgttatcaccagttagcatcatcgtttggcggatgccgacttttttcagttgtgcaatcgctgtggcagcatcttttttaagctgatctgaaataacgaggtaaccaagataatcagtgccataagcgatgtgcaccgcagtaccgacttcagtaggggtgagtggtgttagcccttgttccttgagccagctagctttacccacttttagggattggccgtcaagagttgcactaacgccgtgaccagcaacttccgtgaccgcactgagtgtttgattgagtggtgcttgattagcagcaatgatggattgtgcaatcggatgtgttgagtgttgttctgctaaagcggctaatgcgagtaaatgttctggttgatgatcgacagcgtgaattgctgtaacggtaaaactaccttgggttaacgttcctgttttatcgaaaacaactgtccgcacatcgtttaaagcttcgaggtaattgctccctttgaccaggatgccgtttttagaagcagttccaatgccagcaaaaaagccgagcggaattgaaatcactaacgcacatggacaagaaatcactaagaagatgagtgctcgatagagccaatctgagaagggttgtcctaaaaagagtggtggtacaactgctaataatacggcaaagcctaccacgattggggtatagattttcgcaaagcgggtgataaagttttctgttggtgctttttggctgctagcattttcaactaggtctaaaatcttagcgaccgtcgagttagcgtaaggttttgtgacttgaagggtcaaaagaccggattgattaatgctgccactcaagagggtatcgccaacgttaaatgaacgaggcaccgattcaccggtgaccgcagcggtatcgacaaaactactgcccgcgatgacggtcccatctagtggtactttttcgccaggtttgattaagatcgttgcaccaactggcacggcttcaggcgcaacttgttggaggccttggctagtttggagattggcaaaagttggtttaatcgcaactaaactggcaattgaatcccgagagcgattgatcgctaaactttggaaatattcaccgacttgataaaacagcattacgccaactgcttcagcgtattcgccaatcccaaaggccccaatggtggcaacggtcattaggaagttttcgtcaaaccattggccgtgaagaatattccggatggctgtccagataatatcgtaaccaatgaggacaaaagcgactagcaataggctgattagtagtggctgactaagcggtaagacgtagcttcctaatagtaaaaggccgctaatgataattcgaatcaggtctagattaaatttgaatttcttagggggtgtttggcccgcagccggtaatgatttttgaatggtgacatctggttcaattgtcgttaacaattgttggagcgccaattcaaacgcggtggcggcttgatcaccggttaattcataactcagtttttgcgtcgcaaagttaaccgcgcaatcttggacttgcggtaattttttgacgtttgtttcgattttggtagcgcaggcggcacaatcgatacctgctaattgaatttgtgtcattgatgagtcctccttattggttaatgaaccgtcaattcggatctaaatcgttatatttacgaattagatatacatatgagcatatattcatatgttacctataagataacaccacaacctataaaatgcaacccgtttagtttgtagtagtttagagaaaaagaggctgcagcaaaagttaatttgctgcagcctcttttaataattagtgctcgttaacgtgcgcgatgacttgtgagaagatgttaatcacatggttgtcagcaagggagtagtaaacttctttgccctctttgcgactcttaacgagctttgcttgtttgagtacccgtagttgatgtgagatagaagattgcgacatctctaaaacgctgacgatatcgtaaacccgtaattctgattggaagagtgcgtacagaattttagcgcgggtcttatcgccaagaattttaaaaagtgttgagatatgatcgagcgtgtcttctttcggaagtgttttttgaacggagcgaatcagttgatcgtggtcgattgtcataatagcctgccttgttagaatttagtgttaaaaaaggaatgttttaatagtaggtttgtggggcggagttgttttggcaattgccggtaataagctaatgcaatggttggtaaatcagtattaggatccaattgaatcaatgcttggcgacttttgaaccagccggttgcggtttggagccaaacctgattgccaacatagcgaacggctaatattttgtggcgactattagctagcagctgaccggttgtctgggtcggatgcaagggactattccaagtcgcaacagtcatcggattgggtttgatctgggctgttttgcctaccaataaggaagctgcttgggcggtttggccaacattaatcgcatcgcttaatacaaaccggttagtgccaattcgataataggtctgatcggcaaccgtgacggtttgggttacgtcgtagctatgaccagccttagccggtgctttagtgggcacttgttcgtaggggttttcaacggtggttaaatcgtgaacgctattgacctgaccagtcgtttctaaggattcaatctgggattgatcttgggcggcttggtaatgtcggcctagggcaggataattagtgacgacgccatccacatcgaggttaacgagccagttccaagtggcctgattttcggccatttcattccagacgtagactttttggtggaggtaatgcaattgtttgataatcgtcggcgtcactaattcggaagaaatgttaatcccgtccgcatatttgaagctttcaaatgaaatccgcttgagactacccacaataaaaatgcggggaatctcaggcattagtttttgcatattgattaaacttggtaacaagaaggaatggaccatgatccgcttttgcaggtgatacttttgaatgagcgcgactaattttgcttccatgtcctgcgggttacccttttttgttttcttggtttcaattaagaatttcgcattggggttgttctgatagtgttggaataactgttcaacgctatggacaggttcaccattactcatttttagtgtgcttaatttggcaaacgtgttttgagaaacaatggtgtcgacaccggtgacacgttttagattacggtcgtgcgagatgactaagacgccatcttgagactcatgtaaatcgagttcgacgtagttggcaccttgcgaaaaggccatatcaatactctggaatgtttcttccggggcattaatgggatcaccgcgatgaccaacaactgtaaagccagataataagagaaagtaaaagcagcaaaagagcacgatgcccagttgtgatttggactttaacaaagttaacggcctcctaattaaatttaaaactactaattaagataccattatttttctaaaaaacctatcatcgtgttagaacccagttataaattaatcgaattattactaaataataattgacaacgcttacattgagcggtatattatgtctgtaaggtacttatgcaattacctttttatcaattctctttctctcttatgccaaccactgtctacggatagtggtttttttgcgtacatattggtaaaatgaacgtaactgaaatcggataagaatagggagtcacactatggcagagaaacaacaagtgtttgatattattgaagaaattacacgcttagacggttcaacgtactatgagttaggcaatatttttatgaatggacgggcagaactcgccgctaatcgcgggttaattaagggtgtgcggattttgcaattaaacattccacattctaatgccgttcaaacttacgaagactatattaataatacttatacgatgcccgctgtggattttacggaatgggaagaatgggagaaaacaccagggcctgttgaagaggcctttaaagaagtcttaaaagcaaatcatattggctaggtggttgataaaatgatttattttacagcggatactcatttttatcatgaagaattactcgggatgaatgactttgcgccacgaccgtttgcggatgtggccaccatgaatgagacgattgtgactaactggaatcagcgtgttcaatcggaggaccaggtttacctattaggagacgttgcattagtcccgaataaaccaactgcttttgcgcaagttaatgctttgctcggcgcattgaatggtcagattattctggtgaagggcaatcatgacaaccgtgccttctttaaatatttgaagaagcacgatccgggaacagaggcacacccgcactatcaatttgtcgatgtcggggcgctaattaagattaatcaccggcagtatttcttaacccattatccgctgttactcggtaaagttagccaaacggttaacttgcatggccacattcaccacaacatgctaccaattgctgagaatatcaacgtggggattgacgccccagaacgtgaattattgaaaacaccactaccatttgggacacctttatcagtagcggacattgaagcaatcttgacggcaaaacaaaaggcgttaacgcaattaaaataagaggatgacaaaatggaaactattcacatcttacacacgaacgacttacactcgcattttgaaaattggcctcgaatgcgccgctttttgttagctcatcaagcggcctatcggcaaaaaggtgaaacggtcttaacgtttgatatcggggatgcaatggatcgtagtcaccctttaactgaagcaacagacggccagattaatacgaccctgttgaatcaaattggttatgatggtgtgacaattggtaataatgaaggtattggcaatagtcatgcacaattggaacatctatacgatcatccgaattttcccgtattgttagcaaatctctatgaacaatccacaaacaccctcgctaaatttgcgcaaccgtaccgcattatcacaactgatcaaggcacgcggattgcggttgtcggattaacagcgccattctttttaacgtatcgacctaatggttgggatcctgtcacaattagtgaagaaatgccacaattactggcgcaaattgaagggcagtatgatgtcttagtattactatcacatctgggcttaacaacagatcaatggttggcagaacactatcctgaaatcgacgttatctgcggcgcccacacacatcatctcttaaaagatgggctgatggtgaatcaaacattattaacggctgctgaaaagtacggtcattatattggtgatatcacgttaacactcgatgctaaccatcgcccggttgatcggaaagcccggactgtcttgacggccgatttaccagaagaagcggcggatgaggctgaaattgcgggttatttagcacaaggacatgcccaattggctgcccaagtggtggctgacttgccagaagtactgccgattgctaccattggagagtcaccaatgatgacggccgggttaaaagcgattgaagcggcaacgcaaacagaagccgctgttttgaataccggcctatttttaggcgggctcgaaccaggtttggtcaccaaagatgacctgcagagccaattaccgcatccgatgcatttgattaaagttaccttaaagggctacgatttatggcggttagtcttagaaatggaaaaaaaccggttattcttacgtaagtttccgattaaagggatgagtttccgtggtaaaatctttggagacatcgtttatgatgggattacagtggatatgacattacgccgcgtcttttggcatggtcaggagattgatcctgaagctagctatacgttgacgacagttgatcattacctctttattccgtttttcccaaccattgaaattgtcggggagactgaaattatgttccctgattttctgagaaatgcagttgctacctatttaacacaaaaatatcccgtttaagggaagaggaggttcgccgtggcggatacaaaaacaaaaccgaagattgctaagaaggtaactcgggcgcttgaaaaagaaatgattgcagcggctaaacaaccggaagtaccacagcacgtcgttgttaagagtgaaaccatgattgacatcgataagtgtgcctacgaagtggtcgccaattatcgcgatggttttgatgctgaaaagctaaatgaacgctataacgaggttcttgcgaagtacgattatattgtggcggactggggttttgaacaactacgccttaagggattctacaaatcaactaatcgacgggccaataaggatcaattaattgatacactccaagactacctatatgaatattgtaattttggttgtgcctattttgtcttagaacgacaaggtaaaccgcagattcgcaatgaaaatcgccgtagtaatcgccggcgcggcccacagaaacaacgccggcaaaagcaaggcttcacggaacgtaaagtaacacctaatcaaaaagtgactaaagaacagccgcaaaaagcggtcacggagaataaaaaatccgttaataagcgccactttaagattcgaccattagagagtaattccccaaaggaaactggaaagtgagtaactaaatgacaaaaacaaactacgcaggctacttaatcgatttagacgggacagtttatcgcggtagcgaacagatgccagaagcacgtgattttattgaacggctccaagctaagaacatcccttttatgtttttaacgaataacaccactaaatcacccgcagcggtgatcaaaaatttagcagataaccatgatattcatgcaaccgaggaccaagtttacaccccatcattggcaacggcgcgttatttgttaaacctaaatggcggtcaagcaaatggcaagacagtgtatgtcatcggcgaaattggtttgaaacaagctttattagatgctggttttagaactaacgaatatgatccagactacgtggtggttggcttagactacgatgtcacttaccacaaatttgaattggcaacgctcgcgattaaacgcggcgctctttttattgggacgaatgccgataccaacttacctaatgaacgtggcctagtgcctggtgcaggttcagtgattgccttagttgaacgagcaacacaacaatcagcgctttatatcggtaaaccagaaaaaatcattatggaaatggcactcgaacaattcgggttaactaaggaccaagtggtaatggtcggcgataactataatacagacatcaaagcgggcttaaatgctgaaatggcaaccttattagtttatacgggcgtttcaacaccggctgatttggcaaaagtcacggcgcaaccaacgcatattatcaatagtttagccgaatgggaagtttaaacggcgtcaaaaaaacgggcaactggctagttttttatctcagtatcgttagtgggagtattctagcggcgattgccatcggctggttgagctatgacttggtaagccggcagcttcatttggcagcgcaaatgcaaatgagccaagcgacgttaatgcacgagtttaaccgcttgatgcgttatttggttttgccgggtggacaatcgctagtgttgccacatttcaagatgtcagcaaatggcttggcgcattttaaggaagttaaacacctcttcttattaacggcggtcattttcttggtgacgattgtgccggcacttagaagctggcggcgtgattttaagtcgggtaggcaatggcgctatattcgaccgatgcaagtcgcactggttatgccgattgtaatagggttgattgccagtgttagctttgatcgctttttcgtgttatttcatgaattgctatttcgcaacctcgactggcagtttgacccgctgttagatcccattattttagtgttacccgagcagtattttatgctgtgctttatctgcttttttgtcatcctcgaaggtctttttctgattattttgtggcgggcaaagaagtcattgaaaatttattaagaagctctaatgatgattgttttaggattaatattcggtatgctagaaaagtgagtaccgacaaatgaaaatataggagtatcaacatgacgcagttaattgattttgtgttacatatcgacgcgcatctggtcaatattgtcaatcagtttggcaattggacgtatgtgatcttgtttgcgattatttttgtagaaaccggggcagtcatcttaccgtttctaccgggggattcattattatttgccgcagctgctttagcggctcgaacagataatgatttgaatatctgggtatttgccgcattattcttagttgccgcaattgcgggcgattctttaaacgaacaaattggtaaaagagtcgggatggctgcaaccaagagccgtttcttcgggaagtttatcaataccgaaaagattgaagaggcccaggtcttctttaacaagtacggtggcaagacgattaccattggccgtttcatgccaattatcagaaccttcgtcccatttgtcgccggtggtagtcaaatgtcatttggcaagttcttccgttatgatgttatcgggagtgtcttgtgggtagtcctttgttgtggggccggctacttcttcggaaacatcgcagtcgtgaaggaacatttctcattggtcgttttaggcattatcgccgtttcattaattccaatggtcatcaccgcggttaagagccaattaaagagccgaaaaagctaaatcataattaaaaaagcgcaccgcctgattctcgtttgagatcagacggtgcgcttttaaattacataatagaagtactgtgaagtggttggcgcttttcagggtagagtttggttaaaagttcggtcacggcaaccggtgcttcaccaaagccgctcgcaattaacttcaccttaccaggataagtggcaatatcgccaatcgcatagacgtttggtaagttggttgccatttgttggttaacactgacttggtggtgatcaagtgttaagccccaatcacggagaatccgtgtatcggagatgaaaccgtagttgacgagtaatttatcgacaaccagttgttcttgatcggttgatttcattttattgagtgaaagggcgagttgatgatcaacttctgtgagaccgtcaattaaaaatggggtcttaatttgaatggaggagttcatcaaagcatcgacactgctttccagaccccggaactgatcacgacggtggatgatatagacttgtttggcgactttttcaagcatgagggcccaatcaatcgcagaatcgccaccaccagcaacggctacggtttgatctttaaattgtgccatctctttagcgaagtagtgaatatagttgttttcccattcaggttgataatcaacggctagttttctgggcgtaaaggcaccatttccgacggcaacaatcacaccgcgtgtatgcgttgttcctttagatgtttctaagatgtaagtaccatcttcttggggtaagatggccttaacggatgtttctagttgggttgtcggttcaaagacggctaattgttcagccaagttagcagtgagctgagcaccagtaatgcctttaaaaccggccacatcgaagatttctttttcaggatagagcgttgcgacttggccgcctagttcagggaggctctcgatgatttgcacatcggctttacgcatgcctgcgtagtaagcagcaaacatgccaacgggaccgccaccgattacggtaatatcaaaaagatggttaggatcaagcataggataacttccttctatagtagacttctgaaatagtatactagaaaaaaattaggaaagcatgttaaaaagaaataataatagtaatttctagattaattcgctattatatactgtgaattaaaaacatttaggaggtctatcatgacatttccacaattagatttagaaaactttgcaggaccaacagcaacttttgacaccaaccatggtgaattcactgttgcgctattcccagaacaagcgcctaagacggttgaaaacttcatcggcttagctgaaaaagattactatgacggtatcgtcttccaccgagtaattaacgacttcatgattcaaggtggcgatcctacaggtacaggtatgggtggcgaaagtttatggggccaagcttttggtgatgaatttagccaagaacttttcaacttgaacggtgctttatcaatggctaatgctggtcctaatacaaatggtagccaattctttattgtgactaatgaacacatcaacccaagcatgatgtctcaaatgcctggtgctggctatcctgaagaagtgattgcagcttacgaaaaaggtggtacaccttggttagatcacaaacatactgtctttggtcaagttttaagtggcatggacgttgttaatgaaattaatgctgttgaaacagggatgcaagacaaacctgttgatccagtggttatcaatcacatttcaatcaaacactaaaaatgataatcgtgatacccagttgattcgtaaactgggtattttttattggttttttataaagatagggtaggttgtttcagatggcttgccttttaccaaggacaaggattagaatagataggataattaaagttggaggacaatatggtttatcgaattggacaaaaagtgacaggcaccgtaacagggattcaaccgtatggtgtctttgtggcattagatgaatcagttcaaggcttgattcatatctcagagtgcggtcatggttttgtgaaggcgctagacgagcaatttacagtaggacagcaattagaggtattagtgttagatgttgatgaatacacgcataagattagtttgtcattacgtgcacttcataaggcacaggatctactaccacaacgagcaaagaagcattactggactaaccgtcggattcaaacaggttttgcaccgattgcggagcgattaccgggatggactaaagcggcaattgaagaattaaaccaaaggggtaaatagatgagtgctaaagtagcaggaacaatcatgtacaagacaaagcaaggtcaatatgattttttagtgcaaaaacaagccgatacggattacaaaatgttatcaacacataaaaattcggatcaaacaccattagctgcagttttaaatgccattaaagcgacgattaaaattgatgttaatgagctaagattgattaatttagctaatattaaccttgaaggtgagaatgtttcgttttttgtctttcaatggagtgaacatccggccgaattctatgacgaacaattgcaaataattgcagaatcgggctatcagttcgcaaaccctagtgaaatcacggaattgcttgataaactggaagtaacaggcgttccacacctaaattaattcggacaatcactgcatatctattcaaaaatgtccgtttttataactttttacatttttattcaaaaaaatgtaaataaatgcttgacgatatattggaatgttggtatagtagtctatgttgtcagcgagtcaattgataatcatcaaaaacgacgttatcgaatttaaaagttttgaatatttattcaaaaaatatttaaaaaaagttcttgacaagttagtacgaaagagtgaagctcgcttttttagttagatttattgttaatcgaagtcataatcgctgtcgttcatggcttcaacattgcccaagcggtaaccattcccaacttgtgagaagaaatcatggttcgctgttgatgttgacatcccgtttaagacaactgggttcacatcttcggctgtatctgggaagagagcgccttgtcctaagttcattagggccttattggcgttataacggaggtaagttaagacttcttccgtccagccagtgccatcataaacttcgtgagtgtacttttcttcattggcataaagatcgtaaagtaaatcatacatccagttttgaagttcttcttgttcagcttttgctaattcgttaaagccgagttggaatttataaccgatgtaagtgccatgaacagattcatcacggataattaatttaatgatttcagcaacgttagccaatttgttgttccctaagtaataaagaggagtgtagaaaccagaatagaagaggaatgtttctaagaaaacactggcaattttttgttggagtggtgagccattttgatagatactattaatcttattggctttgtattgcaggtattcgttagtatttgtccagtcaaaaatttcatcaatttcattaggcgtatttaacgttgaaaagattgatgaataactcttagcatgcactgattccataaattggatgttattcaaaacagcttcttcatgcggtgttctgatattggcttttaagctcgccataccatcttgcgattgtaatgtatcaagtagcgttaatccgccgaaaacgtgacccacaatccatttttcattgtctggtaaactacgccagtcatctaaatcgtttgaaagggggattcgtgtatctaaccaaaattgttcggttagcttttcccaagtcgctttatcgatttgatcttcaacttgattccaattaattgcatgataattttctgtcatcgtctatgaactcctttgaggtatgtagaccagctgaggaacagctggggtttaattggcagcttcttccggttagctacgtctgtcaaacgaccaacaagttggtcattcacctgactaggctaatcctcagaagatacccggcttattgcgcactcttttagattacgcagctttcacatgcatttgcgccgacttcgttttcgtcgtccgtatatgtgcggatgtagtagattgatttaatgcctttatgatgcgcgtagtttctgagaatgttaagatcacgggtcgtcatcttatctgtgcgaccgtctttccagtcgtataagccagctggaattgttgaacgcatgaagagtgtcatactcatcccttgatcaacgtgtttttgtgcagcagcatagatgtcgattactttacgcatatcgatgtcataggctgattcataataaggcatcgtttcgtttgatagacctggtgctgggtagtaaattgtcccaattttcttttcttggcgatcttcaacgcggttgacaattggttggagactagccgaagtatcgttaatatatgagattgagccattaggtgcaactgcgagtctgttttgatgatataacccatcttgcataatcgcttctttcaaagcggcccagtctgcttgggtcgggatgaagacgccgtcgaataatcctttgactttagccgtcttaggcgcccattcagtattcaggtattgatcaaagtaactaccatcagcgtacttactgttttcaaaattatcaaaagtaatcccacgttctttagcaatcttgtttgaagcaactaatgtccagtagttcaataacataaagtaattgcttgtaaagtcgattgattcttctgaaccgtacatcatttgattcttagcgaagtaggtgtgcaagcccatgccgcctaagccgattgtgtgggctaattggttcccatgtgccacagaagggacaacatcgatatcagaatgatcggtcacataagttaatgaacgaaccatcgtttcaattgaatggccaaaatcaggagaggtcatcatgttcggaatattagttgaacctaaattacagctaatatcagttcctaaaacgtcatattcttgacgattgttaatttgagaaggggtttgcacttgtaagacttcagaacaaaggttactcatgataattttaccgtcaattgggttggctttattagccgtatcgatattcacgatataagggtaacctgattcttgttggagcttgctaatttcattttctaaatcacgggctttaattttcgtcttcttaatcgcgtcgttagccactaagttgtcatattcggcggtaatatcgatgtatgagaaaggttggccgtattcacgttcaacactatatgggctgaagagatacatatcagcgtcttctttgactaattcatagtacttatctggcactgttaagcctagtgagagggtctttaaccgatatttttcgtccgcattttcttttttagcgcccaagaaagccacgacgtctggatggaaaacgttcagataaacaacaccagcgccttgacgttgccctaattggttggaataagagaatgaatcctctaataatttcataacaggtaagacaccacttgcagcaccgtcgatgcctttgattggatcaccagcaccacgcaagttagacaagctaatcccgacgccaccaccaattcgtgataattgaagagcagagttgatggtccggccaattgaattcatatcgtcggttgtttgcaataagaaacatgacactaattcaccacgacgagaacgtcccgcatttaagaaggtaggcgtcgctggttggtaacgttgatggatcatttcatcagcaacactcattgcaagggcttcgtcaccatccgcaaaatagagcgcgttggtgaagacccggtctttaaagtcttctaagtaaaagccgttatcatttgttttaagagcgtattgcgcataaaacttataagctgccatgaaagatttaaaatgaaagtcttgatcgattaaatattggtttaaacgttccataaaatcgattgagtaggcctttagaaaatccgcttcgtaatagttttcagccaccatgtaatttaagcgatcttgtagtgatttaaaagtcaccatgttgggttgcacattttgttctaaaaaggcttctagtgcttcttgatccttttgaagggggatttgaccgttaaccggaatgttgatttggttattcaattcataataagttacgttttcagttttaatctcttttaaagacattagcgcaccactttcttaaaaaaattaataaaatgcccgattttgggtgtaaaaaaagtgaagaccaactcttcaaggagttggtcccactcgtagatgcctattttaaggacagcacttaaacttaaaaggccaatttttgtaattcggctggtctaaaaccggagaaactttcaacaccgtcagcttcaagcacaggaacagcttggaaccctttttcttttaagtaatcaatatattggggttcatcattaatattatgttcgctaaaagtgatattgtgtgtttctaaaaaatgcttcgtcatacggcattgaggacagccgttcttcgtatatagtgtaatgttagccattgtgattaactccttgtggaacttaattagtaattttagtataccgtttaaaaaagaatcatgcaatgtttaaatactagatatggtagttaaaagtaaaacagccactaattatagtggctgttcgcgaatgattctaaattcaacttgtgtagtgttcctgttttaaagttaccattatcttggataatgtcaatccccaattcgattgcaagcaatttgaaaccgacaccgtttcagccgtagcaacgttcctaaaaaatattaaaatttctgattcacccctgaaaaatcaaaggtcttttttttaccgaacgatttataaaatgggtgatagaagtcgtgaaaatttttgtttgaaacgtaaccatgcagattgttgggcaatcatttcatctgttaataataccgcgtttttgatatcttctaaataaatctgctcgagctgacgagccaatttaggatcataaataaaagcattggcttcaaaattcaatttgaaactacgaatatccatattagccgaaccaatcgtactaatatgaccgtccatgacaactgttttggcgtgtaagaaaccgtcttgataagcgtaaatcttaatgccagcttcatgtaataactgactataatactgtgtggcccgataaataaaaggatgatccggcatgctaggggtcatgatccgcacatcgacaccagacatcgctgctgtcgtgagcgcatcgataatactatcgtcgggtaccaaataaggggtttgaatccataattttttcttagctgaactgatcatcttcaaataacccaacttgatttgttcgtctaatttatcaggcccgctcgaaacaatttgcatcgctgccgtgccgcggttagcttccgctgcaatcgggaagtggctttcagaataagttaaacgaattgcttcttcaacactggcattccaatccatcaaaaagcgtacttgaagcgccaaaaccgcattcccggtaatgcgcatgtgtgtatcacgccaattgccgaacttagcactacggccgagatattgatcgccaacgttaaaaccgccgatatacccaattgtgccatctaaaacgacgattttacggtgatctctaaaattcaaacgaaaatccgtgattgaatgtttcgaactaaagaaggtccgggcatgtccgcctgcttcttcaagtggccgccaccatttttgggtcgccccttgagaaccccaagcatcgtataagacgtttactgcgacaccttctcgggctttttgaaccaatagtgcttgtagctcattaccgatttgatcattgtaaatggtgtagtactcaatatgaatactcttagtcgcttttttaatatcggcgaacaaggcagcgaatttttcggtcccgtcagtatataacgttacgtgattatcctttaaaaccggtgcgttgttgatgtttaagaaaagattgaccatttcagtcgcttcactggacaacaccttcttaggtaataactcattccgccgattttcttgacgttgaatatcaactaaggccaaaaccccatcgttgatttgtgactgactttggaaaatctttttccgggataacccccgccctgtaaaaaggtacaaaataaagccgacaacaggcagtaagattaaaactagtagccatgcccaagtcgccgcaatatcgcgcggttgtcgtaagacggtaatgaccgcaaagaggccgttaattaaaataattgcggaaataatctccgttagtagtatcatatgcaaccaatccttccagaaactaattaagtgtatttataaacagtctactaaaacccatttcgaaacgccatgtttttaatgactatttttttaaggcttgttgtgcgaggtggtgcgcacctttattttgccgatcaggtaaccactgatgtagcacgagggaatagggctgttctaaggcgataatctgatcaacatattgctgataatgtttcgcatattgtttttcgaggctttgacagacaattttactatcaacattaatttgaagcagtgactcggtcaaagcgagtgtggcaatcttttctaaacctaattgaaccgccataaattcggcaatgtgattatcaaccggcggtaagggaatgctaaattgatattgctttttggcggtcacaattaaaatcccagctgcactgggaccgggattgccaagtgtggccgcatccgtataaagtttaatcattcgtaaagtttccacctttccactgacagagacccctagttaatggtaatatggactgcataaggagtgtttctattgcaaactaacaaacgcctattttatcagccaaactacgcttattgcgtcacgatttggtcttggattggttttatttatacgctagctttaattctgcaacttgaactcattaatcttaattggcaatcaattacggtggggatcatcgcggttattttaaccattattaatctatttggtcaccgtctcgacatctctgcacagacgataacgcttaaacgaccattatttaaatataaccgaacaattcaattggcacaaacaacagccgtaattgttcaaaaacacggcttattaattaagacaactgagcttgactatcaaccagagcaattattattatcgaaaaaagttaagcaacaattgattaccacattacaagcaaataactggccagttcaaaataaacagtaaaaaatagaggactcgtgcaaaacgtaaaatcgttttggcgcgggtcctcttttttaatatcgttaagcttcaattttttggacgttagccgcttgtagaccgcgggcgccttctttgacttcgaataagacctgatcatctttgtctagtgtcttatagccgtcaatttggattgcggtaaagtggacgaaaatttcctcatcatctcggtaattgatgaagccataacctttagcattgctaaaccatttcacgattcctcgttccatcacaatccctcctctaaagagtggtgtgtcaacacaccattgtcattgtgccaattaagttgtaggccttaactgatcacaattacatcttaccactttagtcgagacgtgtcgaagataaaatttatcggattactatctgccaattccgtacaaaatcggctatactaggtactatcataaacaaaaggagctggtcgttatgtcagatattcaaatcgcacaagcaaatgaagctacagaaatgaaatccattacggcaattgccgaacaaatcgggttgcaggccaccgatattgaacaatatggcccttataaagcaaaacttaactttcaagccatcaatcggttaaaagaaaaagaagatggcaaactcgttttagtcacttcgattaatccaacaccagccggagaaggtaagtcaaccgttactgttggcctaggggatgctttacgccaacttgatcaatcagcagtcattgccttacgcgaaccttcattaggccctgtcatggggatgaaggggggcgcgactggtggtggttatgcccaagtcgtaccaatggctgacattaatttacattttaccggtgacatgcacgccttaactgccaccgtaaataccctagcagccttaattgataatcatctacaacaagggaacgttttaaacatcgatcctagacggattatctggaaacgcgcactcgatattaacgatcgtgctttacgccaagtggtgattggtttaggtggaccagtacaagggatgccaagacaagacggctttgatattaccgttgccagtgaattgatggcgattctttgtttagcaaccgatattaccgacctcaaaaaccggattagcaaaatcgtgattggctacaactatgatcgcgaacccgtgactgttggtgatttagaagtcaccggggccatcgccatgttattaaaagacgcactcaagcctaatatggtccaaactttagaacatacaccagcactcgtacatggtggcccatttgccaatattgcccatggctgtaatagtatcttagcgactcaaacagccttgaaattaggcgatattgccattactgaagctggctttggggctgatttaggcgctgaaaaattcctcgatattaaggtaccgcaattagggaaaacaccagataccatcgtgattgtggcgactatccgtgctttgaagtataacggtggggtggccttggccgatttaaccactgaaaacttagatgccttgaaagctggtttcagtaatctagccaaacatattgccaatatgcaacgctatggcgtccccgttgtcgtgtcagttaatgaatttataagcgatacggctgccgaagtccaattgctacaagatctttgccaagcaatgaaggtcactgcggtcccaactagtgtctgggccaatggtggtcaaggcgggattgaactagccaaagcagtcttagcagccttacaacaacctaaggccttcaaaccattatatgatccacaagctgacatcaaatctaagttaacaaccgttgtaaccgaaatttacggtggccgcgacgtcgtgttcgaaggcaaagcgatcaatcaactaaaacaaattgaaaaaaatggttgggctcacttaccggtctgcatcgccaaaacacaatattcattatcagatgatcctaaagcactcggtgcgccaagcgactttacaattcacgtccgcgaattgattccaaagctcggggccggttttatcgtcgcaatgactggcgccgttttaacgatgcccgggttacctaagaaaccagccgcactcaatatggatgttactgcagacggccaaattagtggcttattctaacgagactgcacctaaattgcacaatcctgcaccccaccacgaaaactgattgacaagcgcgctctttttaaggacaatgttaatcagtatgaataggaggcaaccatgctactttatattattttaggcctattaatcttggtgggtgatcaactcttaaaagggtggattgtcgccaatgttagctatggcgcgttgcacactgtgattcccaacattctcggccttacttacgtccaaaatgacggcgctgcttggagtatgttggctggtcagcaatggttcttctatattgttaccatcatcgcagtaggtgttattggctatttattttatacctctgaacgatctgaaaaactatatcgcatcggcttgacgttaatgttagccggcgcgttagggaatttcatcgatcgtttacatttaaaatacgtggtcgatatgttccaattagaatttattaattttcccatctttaatgttgcagataccgcccttacttgtggtgttatctgcgtctttattgccatcttgttgaaagagaaagtgactcatgactgaaaaaaaagaatttacaattacaaccgaaactggccggattgataaggtattaagccaattactacctgattattcgcgttcccaaatccaacaatggttaaaaaaggacctcgttgaaatcaacgggcaaacttctaaaggtaaccataaagtggttgctgatgaaaaaattagcgtcacgattccggatcctgtctcactcgatttagtaccagaagatattcccttagacattgtctatgaagatgaccaagtccttgtggtcaataagccacaagggatggttgttcatccttcaccaggccatcctaatggcactttggtgaatgctttattagcacatacaccactttctgaaatcaacggtgttttccgcccaggaatcgtgcatcgaattgataaggatacttccggtttattgatggtcgctaagactaacgaagcccacgaatcattatcagaacaattaaaggctaagtctaatctccgtgaatacctcgcattagtgcatggtaatatcgaagaagacgaaggcacaatcgatgcaccaattggccgttcaaaactggatcggatgaaacaagcaattgtcccagacggccgcccagcggtcactcattttgaagttgtcgaacgctttacggattatactttaattcgttgtcgcttagaaacgggccggacacatcaaatccgtgtgcatctcgcttatattaaccgcccagtagccggcgacccaacttatggtcctcggaagacattgcctggtaaagggcaattcttacatgctgctgttttaggctttaagcacccaacaaccggtgaaaacatgcgttttgaagcgccattaccagccatttttgaaaaaacgttgcaggaattacgcgaaaacaattgacaaaccgcgatttatcaactatgattatcacaacttaatagaaacctttaatttcagtcccgtgaggctgagaaggcacggtgaattaatccattagattagaactctaggactagtctcaaactgtaacctctcaaccaatatcggttgagaggttttttgttggaaggagtgtcatgaacatggtgaaagaagtcgtagatagcacaacaatgaaacgtgtttttacacggattacttacgagattatcgaacaaaacaaggggatttcagaccttgtctttgtcggcatcaaaacacggggcgtttttatcgctgaacgcatcgctaaacgtttagaacaactcgaaggcgttacggtaccagtggggacacttgatattacactctaccgtgatgatcaacatgatttaaatagtcataatgaaccccaactaaatggcaatgacatccctgtcgatattacggacaaacacgttatcctcatcgatgatgtcttatatactggccggacaattcgggccgcacttgatgccttaatggatcttggtcgccctaaaaaaatctcactcgctgttttagtcgatcgtggtcaccgcgaactaccaattcgacctgatttcgttggtaaaaacattccaactgctcttaacgaacaaattaaagtcgctatgcaagaaattgacgaacatgatggcattaccattgaaaaattgaattaaagctagaaccgtttaattgtctccagagagagcaaaagggtttgcccgcataattggcgaaaactgactagcatcagttcgcccactatgcgtccaaaggacatacccgcagagtagggatgtcctttttttatcgccattatcgcttaatgattaattatcggaggtcttcatatgacaaaatcaacttaccgcaatcccgatgcggtgttagacgtgaacgagcgtccaacaaccgggaaatggattggcttatccatccagcacatgttcgccatgtttggctcaaccgtcttagtgcctatcttggtcggcttaaaccccggtatcgcactctttagttccggggtcggcaccctgatgtacttattaattactaaagggaagattccagcttacatgggatcgagtttctcattcatcgtcccaatgctcgctttaatgaaaacaactggttatcccgggattgcgcaagggacaatggccgtcggtgcggtttacctcatcgtttctgtcttagtaagtttaattggctccggctggatcgacaaagccttgccaccgattgttgtcggcccgattgtcatggtcatcggcctctcattagccggtacagccgctaaacaagcgacaatcaatgccgctggtaactatgacttgaaattcttcgcagtcgctatcttaaccttactaatcacaatcgcctttaacatgtatctcaaaggcttcatgagtttgattccggtcttactcgggattgtctcaggttacatcatcgccgtcttgttcggcatcgttgatttccaaccggtcttaaacgctccttggttcaaggtaccggatttccaagtgccatttgtcacctataaacccggtctttactggggcgcaatcctcagtatggcaccgattgcgtttgttacaatgacggaacacatgggccacatcatggtcttaaataaattaacgaaacgcaacttcttcaaaaatcctggtcttcaccggactttagcaggggacggaacagcttcaatcatcgccgcttttgttgggggccctcctgtcaccagttatggtgaaaacatcggcgtcttggccattactaaagttcacagtgtttgggtattaggcggcgccgcattttttgccatcatcttcggtttcatcggtaaactaagcgcactcatccaaagcatcccggcacctgttatcggcgggattagcttcttactcttcggcgttatcgcctcaagtgggctccgggtcttaatcgacaaccaagtcgatttcgataaaaaacggaacttaatgattggctcatcaatcttagtgattgggattgggaatgcctacttacaacttggtcaatatcaattctcaggcttagcgattgcaacggtcttaggcatcgcaatgaacctgatcttaccacaaaaatcaaagagtgaaatcgaattggaggcacaacaaaatgactaatcaaacggcgattgtatctgttgaacaactaacaaattcatctgttttaaatttaattgaacgggcagaagcctttaaacaaggtgcgacttgcgaattaacgcgtcccgtatacgcgatgaacctcttttttgaaaatagcactcgaaccaaaacgagttttgaaatggccgaacgcaagctcggattatcagtaatgtcttttgaagccgaaaccagttcagtttcaaaaggagagacactcagcgatacacttaagacggtccaagcaatcggcgtcgattttgtcgctgttcgtcatccgcaaaactactactacgacgatttactcgccgatccagcctttcacttagccttggctaacggtggggatggcagtggtcaacatccatcacaatgtctactcgatatgatgaccattcatgaagagttcgggcacttcgacggtttgaaagtcgttatctgcggtgatttacgccactcacgagttgctaaatctaacatgcaacttttaaaacgactgggcgcacaactctacttcgccggtcctgaagaatggtttacggctgaattcaacgattacggtcaacacgtcgccctcgatagcatcttagatcaagtcgatgtggtcatgttactcagaattcaacacgaacgctttgattcagccgaaacaatgaccgacgaagccttccacgttaaatacggcctaacagcacaaagggccgcccaattaaaagcaagtactatctggttacacccagcaccagttaaccgcgacgttgaaatcgccgatgaattagtcgaagcaccccaatcacgaatttttaagcagatgcataacggggtcttcatgcgcatggcaatgattgaatacttattaaaacaaaaaaatctcattaaagattaggggtctgcagtatgtatcgacttatccaaaatggtcaactattaattgacgatcaactcgtcaaaagagacatcgcgattgatgaaaaaggacggatcactgcgattgaagcgcaaattacaccaactgacgagccaaccgaaaccatttttgatgcacaaggggcgctcgtgagtgccgggttaattgatggacatgttcatttcagagatccaggtttcaccgataaagaaaccctccaaacaggtagtcaggctgcggctcacgggggttatacgagtgtcattgcaatgccgaacctcaacccagtgcccgataatctatccgatttcaaaacattagttgcccgtaaccaaacggaaacaagcgtccatacgtatcaatttgcaccaatcaccggcgatttagtcaataatgacctagttgatatgccggctttcaaagcagcaggcgccgccggttttaccaatgacggtcacggtgtgcaagatgcccaaacaatgtacctcgccatgcaacaagcagcagcaattgatgcgccaatcgtcgcgcacgttgaagacatctcattagtcaacggaggtgtcattcacgacggtgccgcggctaaacggttaaacgttcctggcattcctagtgtgagcgaatccgcccaagtcgcacgtgatatcgaacttgctcgtgcaaccggcgttcactatcatatctgccacatttcaactaaagaaacagtggcgcttgtccgccgcgctaaagcagatggtgttaatatcacttgcgaagtcacaccacatcatcttttactcgacgatcgttcaatcattagtgacgataccatgttaaaaatgaatccccccctcagaacgttagcagatcgtcaaagcctctgggcaggtctgatggacggtacaatcgacgtgattgcgactgatcacgcaccacataccgcggctgagaaaagtcagtcgttattacaagcaccatttggtatagtagggagtgaaacagccttcagtttactctatacacacctggtcgttaatgggccctttagtttagcccaattattagctaaaatgacgaccgttccggcacaggttttcaatctaccagcagccggtcaactacgcgttggcgaccaagccgatatcgctgtttttaacctgacacaacccactactattcaagcaaccgactttcaatctaagggtcacaacacgccattcatcggtgaaacggtacttggcggtacagaattgaccttagttgccggtcaagttgcttatcaaaggagtaaatagcttatgaaacgttatctcatcttagaagacggcaccgtctttagcggttttggcttcggtgcacctacaatctcaaccggtgaaattgtctttaataccggtatgagtggttatcaagaaaccattacggatcaatcctacaacggccaaattattgcttttacatacccattaatcggcaattacggtgttaaccgcgatgattttgaatcaatcaaacctacctgtaaaggggtggtcgttcatgaagtcccacgcttagctaataactggcgaatgaacatgagccttgacgacttcttaaaacaaaagaaaattcccggtatttggggcattgatacccgcgccttaacgcgtcgcttacgggataaaggtactatgaaggccagcatcgtggatgccgccgacgatcatgcttttgatcaattaaaagctttggtattacctaaaaatcaagtccaacaagtatcaacggctaaaccatatcctagtcctgcgaccggtcgcaatatcgtggttatcgacttcggattgaagtacagtattttacgcgaattatcaaaacgcaactgtaatttaaccgtcctaccttataatgccaccgctgaagaaattctcagcctcgatccggacggcgtcatgctaaccaatggccctggggatccagaagatgttccagaagcaatcgaaatgattcggggcattcaaggcaagctaccaatcttcgggatttgtcttggccatcaattgttcgcactcgctaacggtgctaaaacatacaaaatgaagtttggtcaccgcggctttaaccatcccgttcgcgaaattgccactaaccggattgatttcacgtcacaaaatcacggtttcgctgttgacgcagactcaatcgacccacaacaactattagtgactcacgttgaaattaacgaccacactgtcgaaggactccgtcatcgtcagtacccagcattttccgttcagttccatccagacgcagcacctggtccacacgatgctgtccacctatttgatgaattcatcgacatgattgatgattttaatcgccgccaaaaatagaaaaaggggatttagtgatgccaaaaagaaccgatattcgtaaaattttagtcattggctccggtccaatcgtgattggtcaagctgccgaatttgattactcaggaacccaagcctgtcttgcacttaaagaagaagggtaccaagtggtgctcatcaactcaaaccctgcgacgattatgactgataaaacagttgctgacacggtttatatcgaaccaatcacacttgattttgtgacacaaattttaagaaaagaactaccagatgcgatcttaccaacacttgggggtcaaacaggtttaaacatggccttagaactcgctaattgtgggattcttgctgaactcaatatcgaattactcgggacaaaattaagcgccatcgatcaagctgaagatcgggagttattcaagaacttgatgaaccaactcaatgaacccattcctgaatcagccattgcgcactcattagatgatgcacaagaatttgtaaaacaaaatggcttccccgtaattattcgccctgccttcacacttggtgggacaggcggtgggattgccgaaaatgcaggccaactcaaaacaatcgtcaaaaacgggattgcattatccccagttggtcaagtccttgttgaacaaagtattgctggttacaaagaaatcgaatttgaagtgatgcgtgatcgcaacgacaacgccttagtcgtctgcaatatggaaaacttcgatccagtcggtatccataccggtgattcaatcgtctttgccccagttcaaacattaagtgaccgcgaagtacaaatgcttcgggatgcttcattaaaaattatccgggccttgaagattgaggggggctgtaacgttcaattagccctcgatcctaacagcgagcgctacttcatcattgaagttaaccctcgggttagtcgctcatcagctttagcctcaaaagcaacaggttatccaattgctaagatggccgctaaaattgcggttggtctaacactcgacgaaatctataacccaattaccgggactacttacgcgcaattcgaaccgatgttggattacgttgttgccaagattccccgctggccttttgataagttcaataagggtgaccgccaattaggcactcaaatgaaagcgactggcgaagttatggcgattggccggaacatcgaagaatcactcctaaaagccgttcgctcacttgaaatcggcacagcccaccttgaattagatggtttaaccagcgtcagcgacaacgatctggtccaacggattattcatccgcaagacgaccgtcttttctacctcgcagaagcattacgtcgcgggtatctcattcaggaattagctgaattaacgaagatcgatttattcttcttagataaaatcagccacatcgttgaactagaagaacaactccgtagtcaaaaaggcgacgtcgaattactcgaaattgttaagaaaaacggcttttcagacgaaaagattgccaaaacatggcaaatcacgccaattcaagtacgccaaatgcgccaagaaagtggtattcaacccgtttataagatggtcgatacttgtgctgccgagtttgaatcacaaaccccttattactacgcaacctacgaacaagaaaatgaaagtttagtttccgctaaaccatcaatcttagttatcggttctggccccattcggatcggtcaaggggttgaattcgattacgcaaccgtccactgtgtacaagccattcaaaaggccggttacgaagcaatcatcatgaatagtaatccagaaactgtttctaccgatttttcaatctccgacaagctttactttgaaccattaacactcgaagatgttttaaacgtcgttgaactagaaaaaccagaaggcgttatcgttcaattcgggggtcaaacagcgattaacttggccgcaccacttgaagaaaacggcgttaagatcttagggacgagcgttgccaacttagaccgcgctgaagaccgtgatttattcgaccaattgattcaagaattgaatattccccaaccagtcggtaaaacagcaaccaacgcacctgatgcgttaacgatcgcaacagagattggttatcccgtcttaattcggcctagtttcgtcttaggtggccgggcaatggaaattgtgcatacgccagaagacttaactcactatatgcaagaagccgttaaggtctcagacgaacacccagtcttaatcgatcgttacttaatgggtaaagaatgtgaagtcgatgctatctgtgacggtcaagaggtcttaattccaggtatcatggaacatatcgaacgggccggtgtccattcaggcgattcaatggccgtttatccaccacaaaacctcacagaagatcaaaaagcagcaattatcgactacaccactaaactttgtcttgcactcgattgtcatggtttgttgaacatccaattcatcattcaaaatgacgaagtttacgtcatcgaagtcaatccgcgtgctagccggacagtgccattcttaagtaaagttactcaaattccaatggcacaactcgcaacccaattaattttaggcagcaccttagctgaattgaagagtccaacagggttgttaccagcaggcccactcatccacgtgaaagcaccagtcttctcattctcaaaactaacccgtgttgatagtctcttagggcctgaaatgaaatcaaccggtgaagtgatggggacagatgtcacgatgcaaaaagcactttataaagcctttgaagctagtggcatgcatctgccaagtcacggcaacgtcttaatgacagtcacgaaccaagataaggcccaagcacttgctttggcgaaacgctttagagaagttggttaccaaatcatcgcgaccccgggaacaacacaacaatttaaagcggcgggcattccagttcaacaagttgacaagatcaacgccacttcaggcgacttactcgacaagattaaagccggccatatccaactggtcatcaatacaactggtttaaacgaagccccccaagtggctaaagatagtattgtcattcgccaaaccgctattgaacacggcattccattattaacatctctcgatacaacggatgccatcttaacggtcctagaatcacaatcactcctcacaaaaccactctaaaagaagtgcgttcaaactgattatattctgagcattattaaagcgccaaggaccgccttggtctcttggcgcttttattacataaaattcaaaggagtcacgcttatgttgccactagaatggctgttaacgattcaagaccaaactgaaattgcgcctggtattttcgaactccgtttatcaggtgacttagcccaagaaaaggtgcaacccggacaattcgtcgatgttaaaattcctagcgatgcgctcctgttgagacgcccatttgggattgccaatgtcgatgccgcacataacaccattaccttactttatcggacggttggcgaagggacccaaattctcagtgagtgttcacagggaactgaattatccgtcttaggcccattaggcggacacggctatccaattgatcaacttaagcctcagcaaaaagctttaatcatcggtgggggaaccggcattccaccgttacacgaattatccagacaattagtcgctaaaggcgttcaagtccaacacgtttttggctttgctaatcaagaggccatcttttatcaagcggagtttgaaaaactagggccaaccgcctatgcaactaatgatggctcttacggttacaaaggtcacgtcggcttattactcgacgcgcaatttgcagatgccgccacaacctacgacgcaatctatgcctgtgggcctaaaggcttgttaatggctgtcgataatcgcttcagtgcacatccaaacgcttatatctcattagaagaacggatggcctgcggaattggtgcttgttacgcctgcgtcacgaaactaaaagtcgacccaacaatccagctaaaaatctgcgatgacggaccagtctttaaaacaaacgaggtgttaatctaatgactagcgatttacacgtgtctttacccggcttagaactgaagaaccccattatgccagcatcaggctgttttggctttggccaagagtacggccggtattacgatcttaatttactcggcgcaattatcattaaagccgcgacaaaagaaccccgcttagggaatgccacgccaagagttgccgagacacccagtgggatgttaaacgcaatcggtttgcaaaacccagggattgaagccattatgactgaaaagctaccttggttggcagaacgttacccagacctaccaattatcgccaacgttgcgggaaataccgaagcagactatgtcgctgtctgtgaacgaattagccaagcaccgaacgttcatgcgattgaattaaacatctcttgccccaatgtcgcacacggcggcttagagttcggaacttcaccagaggccgccgcgactttaacgaaagcctgtgttgcagttagccaggtccccgtctacgtcaaactctcaccaaacgtcaccgacattcgaccgatagctaaggcagtcgaagcagcgggggcagctggcttctcactaatcaataccttagttgggatgcgtattgatccaaagacccggcaaccaatcctcgctaatcaaactggaggcctctcaggcccagccatcaagccagtcgcaatccgcctagttcatcaagtgcgttcgatttccaacctcccgattattgggatgggcggaatcgcaacagcgggggatgcactcgaactgatggcagctggtgctaacgcgattgctgttggcacggctaatttcagtgaaccatttgcttgtcccaatatcatcaaggcgctccctgatgaacttgctaagtacgatttacatgactttaaaacattcgccgttaaccaggaggttctataattaatgacaaatcccgtaattatcgcgctagactttcccaattggcaaaaaacagaccaatttctacaacaatttcccaaagacgaagcactattcgtaaaaatcggcatggaacttttttatcaagaagggccgcagctcattaaaacgctcaaagcacgcggctatcggatcttcctcgatttaaagctttacgatattccaaatacagttcaaagtgcaatgaccgtcatcggccaattaggcgtcgattacacgacgatacacgcagctggtgggcaaacaatgctgcaagccggtgccgctggcttaaaagcgggcgctaaacaagccaacgtcaaacccgccaagttattagccatcacgcaattaacgtcaaccaatgaggctcaaatgcaacaggaacaactcgtttctgtcagcctgcctgaatcggtggcacattacgcacaactcgcgcaacaatccgactgtgacggggtaatctgttctgcacaagagattaccaccatcaaaagtaagaccgctacagattttctctgcgttacaccaggtattcgtcccgcaacgagccaaaataacgaccaaaaacgggcagtcacaccacttgcggccgctcagatgcatagtaacggcatcgttgttgggcgcccaattacgcaagccagtgatccttatcaagcttaccaagctatcaaatcagaatgggagtctttcaaatgacaacaattgccgaacaagtcgcacaagccttaatcgatatcaaagcagtgagcctcagtccaaatcaaccctttacttgggcaagtggcctcaaaagtcccatttactgtgacaaccgcctcacaattggctaccctaaggtccgcaagttaattgccagtcaattagccgctgccatcaaagcccaattcccagaagttgaagtcattggtggcactgcaaccgctgggattccacatgctgcttggattgcagctgaacttgatctaccgatggtttatattcgctctaaaccaaaggaccacggtcaagggcgtcaaatcgaaggaccctttacagccggtcaaaaaatggtcttaattgatgatttaatttcaactggcggtagcgtactgcaagctgctcaagctgcacaaaaagaaggggctgaaatcctaggcgtctttgggattttctcatacgaattggctgctggtcgcaagaacttcgaacaagccgggttcccactgatgaccctttctaacttttcagcattattagccgttgaacaagctgccgataatctgacaccagaacaagcaacatccttaaatgaatggcgccaagatccacaagcctggtcagacgcacattaaaaaaagagcgtgccaccagtcggatatgctctgaggattaaccctgaataggatgactaatagaacacgtttagaaagtggcggaagtcatatgcctaaaccaacaaaaaagcgttccgtcaaaatttaatttggcggaacgctttttaattaggcttgcactggtttattacgtaacttttgaacgagtgcttcgtccggtgtcgtatagagggtttgttgtccttcgtaaatgacaaaacctggtctggcaccgtttggtttcttaattttcttaacttgaatgtaatcaactggcacagcagctgataagcgggccttcgagaagtaggccgctaagttaccggcttcttgaatcgtttgttcagacggtgtcggactatcaataatcacatgggaacccggaatattcttaacatgcaaccagatatcggttttatgtgcttttttcaaggtcaactgatcattttgatagttattcttcccgacaaagattcgcgtgccatctgtcgcatagaaaacttctggttcactaatcttatagcgtttttgtttcttagcgcctgttttcttaatcttaagatagccttcagcctgtaattcggccttgatatcttccaaatccttaggttcagcgatctcaatttgggccataattgtgtagaaatattgtaattcagcttctgtcttagccatttggtcattcacataggcaatcgagtttcttagtttttgatatttcgagaagtacttctgtgcatttttggaaggactaatttgattggataacgtgattttaataggttcattgttatcgtaaaaattagggagcgtcacttcggtcatgccccgttcaacctggcgtaagtaggtggttaaaatttcacctttgatccgataatcatcggcactatcggctgctttaagcgttttttgtagttttttaagtttcttttcatccttttgaatctcattacgaatgaagtgaatgagggccccaccttgttgctgcacacggtcgcgctgagccttatgaagatagtattggtctaacagttcactcagcgtttcaaaatggctctgcgtccctgttaggctctgataagggaaggcggtaaaccatgatttcttttcaccaattgttaacgttggttgtgcttggtcaaattgcttgaagaaatcagtcacgactgctaaatagttatcgtggtccattaaacgggtttgcaattcaagggcgctttcgcggctcatgccttggaattgttgttgtaaccaatgaatttgttcatcggcatcttcattatagtaacttaaccaatcaagagttcctagatcggtcgtaaaggcatttagaccagttggtgctggtggattaacgtagtcggcccccggcattaaaaagcggaaccggttttgtgaaaccccaacatggcgaattaaatccaggattttttgagtttcaaggttaatcaagatgacattactatgccgacccattaattcgataatcaaacatagcttttgcatgtcgcccaattcgttacgggatttaaaggttagacgcaaaattcggtcactttcaacttgttcaatctgttctaaaatagcaccgtctaaatatttacgaagcgtcatcgcaaaatttggtggcgttgcagggttcgcataaggcacccgcgttacttgcactcgtgcataagaagggtgtgcagataacaaaagggggtatgttttacgattagcccggatggttaagattacctcattggcataaggctgttggattttagtaattttaccgtcggcaagcgttgtattgagctcgttgacaacggcgtgagtcattaaaccgtcaaaggtcattattggtcacactttctataatagaattatcttacttattgtaactgttttggcacagaacctcaaagaaattaacgcatctgctaactaactgcaggtgtttaaaatttacataattagctaaaccgttatcatcgccgttataacgataaactaaagggagagggcctatacaactttttgaaaaaagcgattaataggggaattagcccgtcatttatgatatagttattaccgaataataaaaaagtaggtgtcaacatgaaaattgctgtagtcactgatagtactgcttatctcacagaacagcaagtgaaagaccatcatctctacgttgttccgatcccagtaattctcgatggacaagtgtacgatgaaggcgtcgacattacatctgaagagttctatcaaaaattaaaaacagccgaaacatttccaagcacctcacagcctccactaggcgagatgttaaaattatacgaagatctaggcaacgaaggctacgatgccgtcatcagtatccaccttgccagcacgatctccggatttgtgacaactttgaaaaatgcggccagcaccatcgataatatccaagtcgtgccttacgattctgggattaccgtgatgttaatgggctatctagcaatggaagcagccagaatggcgcgcgatccagaagtcactgttgaacaaattacggcccgtcttgatgacttaagaagcacaattgatgaatgcttcatcgtcaacgacttacaaaacttagtccgtggtggccgtctatcaaatgcctctgcctttatcggtagcatgttaaagattaagccattattaacatttgatgacgaaaccaacaagattacagcttttgaaaaggtgcgttcattgaagaaggcctacgcccgcgctgaacaaatcttcgaagaaacacaagaacgtgttgactacccattacgggcattgattatccatgccaacgatgaagcggcagcactatcatggcgtgataaactccgtgaaaaacatcctgatttaccgattgatatcagctattttggcccagttatcggtgcccacttaggtgaaaaggcaattgccctagcttggattaaggatttcacgaaagaataatattaaataatgctttaaaaaaatggtttacagcaattaagtttgctgtaaaccattttttagttatataatcatgtaagcggttagccaatttcgactaattttgtaccaatgagtttataaataacagatttaacagctactttttgcacaatagccaacgacgattcgctgaggtcaaattcattgacgctggcaggcgcattaatattggccatttcatcgttaaaaagggccacaaattggtcataagcttcaccggcactagtattatctagggcttgttgaatgccttttttgcagacgtctagcgggaaaacaagcttcataatgctgacaataatcaattcagctagatgatcgcggttatagcgtttcttaattggccgttcaataatggccatcttaacgtaactgttaatcatcgttttcgtaatcttaacgtgcaagagtggctctagttgcttattgacttcattaatcacttgatccatatataactctagatccggaaaatctccccattgcggcaggcgcagggcttgaaagtcactaagccactgcttaaattcttgagattgcatttcgatactccttaacgaccgacttgtttgttcttttattatgccatagcgttaatcatttgtcacgtacgtagaatgtaattctatttttagttgacttatattctatatcaatctataatactcgacaaatagagaaaaaagaggcgatcatttgcatatgatgactaataaacgacaacaaattatctacgaagtttggaatgccattacacacggtgtgggcttcttcggtagcctagcattggtaatcctcctgattgttaagagtgttcaaaaatcgctatccccagttgcgattgctagtttaatcgtttacggtgccacattactagcgctgtatctcgcatcaacgttattccactgtttagcctttacgaaggccaaacgagtttttcaaatattcgatcatagtaatattttcttgttaatcgctggcacctatacaccatactgtttgatttttatcgggcatacggcgggcattagtctattgattgcgatttggacacttgcaattgcgggcattttaacacatatttttagccacggtcgctaccaacgtctagaaaccagcatttacgttattatgggctggttatgcttattggcaggcaagacgttatacactaacttatcaccctcaggtttttggttgctcgtcagtggtggcgtcgtcttcacagttggcgccttaatctacagttttcctaaaattcctggattacatttgatttggcactttttcgtaatgcttggaacgacattaatgttcttttcaatttatctgaacatctaaattattgactcaaaggagtatcactcacatgacaattaaaatagtaaccgattcatcaattcaattaactacagcagaacaagaacggtatgatatccatattgtgcctttaacgattcaacaaggtgctgaatccttcgttgacggtcaaacaattacccgtgccgaatttttaagccgcttgcaaagtgcaacgactgagtttccaacaacgagccaaccaacagtcggcagtttcgttgaactatacgaccaattgggggctgatggcagtacaatcttatcaatccactgcacagggttactcagcgggactatcgaaggggcgcatacagcggcccaacaatcaacaagtgacgtccacgtcattgatagtaaagaaattgaccgtggcctggcttatcaagttgtcgcagccgctcaagatgttgaagcggggaagacactcactgaaatcattgcccatcttaatgaggttcgtagcaagacagaaacctacgtctttttagactcactagatgcactccaacgcggcggacgtattagccggatggcggggctcttaacaaaactgattaaactcaaggtgattgtccgcttaacagatacggaattagaagtgattgctaagggacgggggctaaagaccttcaccaaagaaatcaataatattcgcgaacacttggccactcaagatgttgctgaaattggcatttcacacgtcggcatcactgacgaactatccgccaaaatccaagcaacgctagaacaaacccaaccccacgtcccttatacagtcgctttaacgagtcccgttattatgagtcacgttggtctgggggccttcggggttttttaccttacgaaatagtatcaccaaagaacgtcttcatgagacgttctttttttgcgtttaaaattgcgtaaaatctagttgcgttattcagagtcatcatctataatagaatgaacgttctaataagaggagattatcagatgcgcacgaaagaatttgaaacaacagccgtcttagacaaagcaatgctcgttttttggcgccagggatatgaacaaacgtcgatgcaaaacctagtcgacgaaatgggcatccatcgtcgtagtatttatgatacgtttggtgataagcaccagctatttatcgcagtcttagcgcattatcacgatcaaatcaccgcgacatttaatcaaatcatcaatgattatagcgaccttagtagtcgtttgacagccatttttgaggcgttcattaaccacccggcacaacaaccagacggctgtttagtcgttaatacggcaaccgcgttatcaacgttagaagaagatatccaacaacttattaaacgctatttacagcaggaacaagcaatgctgcagcgattactgattgaagggcaagctgagttgcagcctcctattaagagcgagctattagccgcaacacttcaaaatgcattggttggcattcgtgtcatggctaaagtaaatccagattcagaggcgctaatcgtaacagcacaccaaacacttcaaatactcccatggaaagaggcactttaaaatgaaagcagctcaaattacaaaatatagtaaagatctcaatgtgaccgtgaaagaaattgccacccctaagccccaagctaacgaagtactcatcaaagttagctatgccgcagtcaatccgttagatttaatgaatattcacggcagtgttaagttgattcaagactattcgatgccattaacccttggcaatgaagtcgttggtgaaattaccgctatcggttctaacgtaacgccttttaaaccgggtgacctagtttacacacgtctaccacttgctaagattggtggttttgcagaatacgttgcggtcgatgccaatgctatctggtatacacctaccaatttatcagctaaagaggccgttgctgtccccttgaccggtttaaccgcttatcaaggcctcacggaagaattagctgttgaagcagggaagacgattttcattcctggtggttctggcagttttggtcaattagccgtgccagtcgctaaatctttaggcttaacagtcattgtctcagggaacgctgcagcacgtgagcatattctagaattaggtgctgaccaataccttgattaccggacaaccgattattggcaggtattaaacgatgtcgattacgttatcgatactcgtggggctcaagatatcgaacgtgaactttcaattatgaaacccggtggccgtttattaagtttggtggcaggtcctaataagcattttgctatcacgcaccaattacctgcctggaaacgacttttatttggtttagtcggtaagaagtgggataaactcgctagtaaagctcaagttaactaccgcttcatctttgtgcgttcggatggccaacaacttaaaaaagtcactgaattagttgaaaaacatcacattacaccagctatcgatccacacgattttgatcttgatcacgttcaagatgcactggaattagttgctaatggtaaattagccggtaaagttgtaattcgactaactgactaaagtaaatctaaaaagcccagatattggtatttaaccagtatctgggctttttttaaatggcctgtgctaaattctaaagtactgtttggtgccatttttagctagttcaaataaccaagcagttcaattaaatttaatctagttttcaacataaaaataatcgattacggtgattaaagacggtgtgggggacctattaaataaaaaaaatattctagtttacataatatatattataggaagtatgtatttattttaaaagagtggctgattttgacttattaatctgtatttaagtccttaatttagcaaattcttttagcaacgttttaaaatgctttaactaaaacatcaaccgtttaaaaaactcaactacgattaacaaatctcaatgctaaattactgatctgatcgcaaattaaaaccactgcctaatcattaataatcaataaccacatgaaattcgttaaataacttaggattgatttatgcagctgtaaaatccataattttgaggctcaaattgataatcattaaccataatccgagtttaataaaacgctaatttgatgctcaaatcggcctaatcatgctataaacactgttatatcaacgtttcattaagatgaaagaccgttaaacaggcattttattcgtttttaaatggctgctgcagatggtctgaaaacagatttctagggttagtggtcaaaatttgccaaacaagtgttgttaaaattatggttttaacaacacttgtagtattctcgccgcttttttgttaaaataactataattctctattaaggtggtttcaatcatggaccaacaacgttatctcgaactatgtgaacaacgcttggcggatcttcccgattacgtccgtaaattttatattaatcggcaagccaatgcatactcctctgcaacgctctatcaatatctccaagaatacgtccgcttcttctcctggttaattgacgaacaaatcgttactgttcaaacgactaaggatatccctcttgttgcgcttgataagatgaaattagaagatatcgaactctataagatctttttaatgaataaacgaaaagcaaataatcacaagctctcctttcaggctgttaatcgctctatcaacgctttgaatgcgctctggtacttcctgacgattgaagccgaacaagccgatggtgagccttatttctaccgcaacgtcatgaaaaaagtcaaactgctcaaatcatccgagacaatggccactcgttcccgccatatcggtcaaaagttgctcaccggtgataaaaaacacgacttcattgcctttatgcaagtcgactatcccagtgcgctatctaatcgccaactcgcttcttatacgcagaattgtgaacgggatattgcgatttgcgtattggcactcactaccggcattcgtctttccgaactcgcccaagctaacgtttctgatttaaaccttgaacaactaacaattacggttattcgcaaaggcggtcaacaagataccgtgccgatcgcaccttggggtttaccttatctgcaagattacgttcaaatccggcaacaacgctatttagccgctaacgaacgggccttatttgtcacaaagtatcgcggtcaagcgaagcgaatcagtaactatgccattgaaaaactggtagctaagtactctgaagcttttggcgttcgactaacgccgcataaattccgtcatacactcgcaaccgatctgatgtcagcgacccacagcgaaacgatcgtagcgacccaattgggccaaaccaccacgcaggccacccatttgtatacgcacgtggttgatgacgaacagcgctcggcaatggataagctcgaatgaagcttgattgcttgacatctttgttgtatccggtatactgaaaacgttcttaaaatttaaatattaaccatcgcaaaggggagccattggctgagagtgattagatgatcagacccttcgaacctgtttgttaagacaagcgtaggaattgtgatggagttgagactttaactccttttttgtgttggttaaccaagaaaaggggttatttttatgcaacatcaacggttattgattcaaattgaaggggccattatcgcggcatttgcgatggctctggaatatattccgcatactgtagggccatcagcgattgaggtttcctttgggattatccccattattatctatagtctccgtcgcggcgccgcggctgggatggtttcgggtttaatctggggccttttagacctcgtcttacgaggcctcggcaacgggagcgttctcaatgtttggcaaggattacttgaatttacgattgccttcatggtcgttggcctagctggcgttttacaaaaaccagttcaagcaagtatccaacaaaataccaaagtaaaaacgattgcgctcctttggtccgcagctttcattggtactttcgccaaatacttctgccacttcttagctggggccatctactggggctcatacgcgcctaaaggaatgaatgcttggctctattcattaactgtgaatggcggtagtttcgttgccggcttcatcttaaatggtatcgtctttgggattttattagcgatgattccgaaactatacctcccaaaagatatgtttttaaaagtgcaatctgaagaatagttaacaatacaaaaaagaggccctcagcggcctctttttttaatggtcatttctagcacgtaatgcgtataaaatcgaaactgtgtcgacaacttcttggaataaggccccaattaaagctggcacgacaccggtactggcaatcaacatcaatccgatacagatgaagatcccaatcaaaacggactggcgcgccacccgcattgtatcccgtgcaatcgtgatggcgccactaacccgactcaaatcatcctttaaaatgacgacatctgcggattcgctcgctgctgtggcaccgtgagcacccatcgcaattccgacatcggcactcgctaaggatggtgcgtcgttaacaccatcgccaaccatgattatcggccgctgctccggcgtgacattattgatgagtcgaatcttatcggcaggcaaacacccagcgtgaacttcatcaatgccaacttgagccgcaatctctttagcggttgtcgcctgatcccctgtgagcatcattaagcgctgtaaaccgagctgatggagcgttgacatcgtttgaggcgcttcctggcgaagatggtcgataaatgtgatatagcccgcataacgcccgtcaatgccaatgtagacagttgtctgtgtctgggattgtttagcttggtcaggcgccacaaattcaaatttaccgacttgaaccgtctgtccagatgctaattgggcagtcacaccagcacctgtcatttcttttaaactaataatttctaataattgcgctgctgggacgacttgtagtaaggaacgagccagaatatgggccgaagcctgttcagcactggctgctaaacgacataactccgatggttcaatatcaatcatcggtacaacttgatccacggttaattggccattcgtaatcgtgcctgttttatcaaaagcagctgatttggccaacgccaatttttcaattgtcgtccccgttttgacgataatcccattccggctggcacgactcatacctgagataagcgcaatcggtgccgcgagaatcaacgggcatggcgacgcgaccaccaagacctcggcaaagcgcacagggtcttttgagagccaccatgccacccctgcaatcaaatacgccactaatgtaaatggtacggcatagcgatccgctaaacgaacaaaatgggcaggttgtgctgctgagctttcaaccagtttaacaattgcttgatactgactgttaatagctaattgatcgaccaccatcgtgattgatgtctcaccatttactgaccctgacataattggctcattgattgttctttcaactgggcgtgattcaccggttagagacgattcatcaaacagcgatgacccctcaatgatatgaccgtcaaccggaaccagttctcctggcttcacaacaacttgatcattgacttggagttcgtcgacagcaacatcgacaagtccgtcaccacgcattaaatgcgcgacctggggcgagttgtccaataatgattttaattcccgccctgctttatgcgcggcgtaatcttccagggaatcgccgcctgttaacattacgaggaccatcaaggcagcccaatattcaccaacagcgagtgttgcaatgatcgccgtaatggctagtaaatcaacaccatatcgacctgattttaaagtgcgaatcatctcaatcagcatcgataacgcgactaaccccccagctagactaactaatacttgggcccacagtggttgttgacataaaaaggctaatattaatgcggtaatcccaaccacaattgtgagcactaatttcaacgtatgtttcatcattatcggcctccttgtgaattccattacattataacatgttcattgtcatattagaattattatcatctgtaaaaaagacacaaaaaaacccatcatattattgatgggtctcatttacagaaagttgtgccataatagctgtccgaatggatgtcattgctactattaatgttgtcatccgcttaattacaggcgatgtctttttttggttagccaacgctttttcggttttatggatgattgactcaatcggtgcctgtgccctgaccaatgcttcagcagttatatctgtgcgcccattcaataaatcacgaccaacttccaatgcgtgaattctattttttaataaagtaaattgggcggacccttctccaaattttagctggctcttttgacaatttcgaattgtcgcttcaatcacttgaattgcctttgttacttcctcagtcatctgttgctcctaacaaaaaaataaagccccgcaggactttatcttcttaattgctattaaaatgctgctgttaattgtgggacaacttgtttcttacgtgacacaacaccggctaattgcgcacgatggttgtttaaggtcacatcaaaagccttttcgaaggcttcagctggttcgccgataacaagcgcttctgagttactgtttaagatgtcagtaaccaaaagtacgaataagtcgtaaccgttagctttgttgtctgcttcgatagcagcttcaaaagcagcttggcgtttgaagaccgcttcgatatcaactgtgttaacttgatcgatacgaacttttttaccagccatatcgaatgttttagcatcagcttcaattaattcagcttcgctcttatcatctaagttagtaccagcttttaacatttcaagaccatatgattcaaaatcaacatctgcaatttctgctaatgtcttgatagcaatccgatctttttcagttgttgttggtgatttcatcaacaatgtatctgaaatgatggcactcatcattaaaccagctagttgtgcagggatttcaatcttattttcgttgaacattgataaaagaatcgtgctggtacagccaactggttccgcacggtagaataatgggctcactgtttcaaaattagcaatccgatgatgatcgacaacatcagtcactgttaaatctttgatatcagcaacgctttgttgggcttcgttgtggtcaactagcataacactttgtacttcactaccagcttctttaatcacacgtggtgtgcttgcagcaaagtgacgtaatgcataacttgtttcttcatttggttcgcctaaagcaacagcttcgacatccttgccaagttgttgttgtagataagcaaacgccattgccgcaacaattgcgtctgtatctgggttttggtgaccaaaaactaattctttactcatatttatacagacccttcttttcaaaattacattatcgattataccagaaatattaaacaattttacggttttgttctttaattcgcgttaaatagtctttttcttctaggtaaagattgaattcacggaagaaactgtcaatccgaggaatatcttccttttctttacggaatacgaaggctagttcaaattgaatcgctggatcaaattgtaccgcgttcgattcaatgccaacattatgggcatcgtaaaaactctttggcaatgcggtacttaacccagttgcttctgcgaaacgtaagatttcaaatggtgatgtaaattgtgcggcactaactggccgatctaccatttgattcttatacgcctcactgatgaattgattgagatagtattcatcgggataagtaacccatttttcagttaaggtatcttcaaaatgaatcttcttacgttttttcaataacggattactgctcaagaaaacaaggctttcatccgcaatcttcttagaacggtaaggcttccaatttttgacactgtcatctggcaagtacataatagccaaatcaattttattattttcgaggcgattccaaatctccttacgtgtcaataagtgaacactaacttcgatgttaggaaattgttgataatacttgattaagaaactttgaataacactaagttccattgacgccaaaattccgatattaattttaccgcggctagcgctagtcgcactttggatttcatccgttgccgtatttaataaatcatagatttgatgggtcgcatctaccattgtccggccagcatcagagatgtgtaatttcttacccacggaataaaaaagtggtgccccaactgtgcgttctaatttcttaatttgttgggttaatgcaggttgtgtaatccctaatagctgagcggcctgcgtatagttcattgtttccgctaattgcaaaaaataagttaacgttttagaagaaaatatgttttcttgtctcgtcttcatgctcaatcctcatttctttgggttgtcccttatcattataataataaaaaaataaaaaaagagcaacctttttcgtcgccctttcttattattcacttaaaaatttcttatgctaccgctttataccatttattttgaataatcagcggtatgcaacagccgttcagcattgacaacgcgatcatgagttgggggttcgataccttcaagtgggtacttaatccccattttctcatatttaacaattcccattgtatgataaggcaatacctcaacccggtcaacattattcaaggtcttaatataatcaccaagacgttctaagtaacagtcataatcagtccgttctggaatgaggacgtgccgaatccacatatgatggccgtgattagacatatattcaatcatttctaaaatatgttcatttgaaaaaccagttaacttcttatggccttctggatcaatatgtttgatatcaaccatcgataaatccgtatacttcatcaattctttaaacttactaaagaatggttctttgtatgtgaaaggttgcccacacgtatcaagacacgtattaatgccctgtgctttgcattttttaaataaatcaattaagaaatcaatttgaatcagtgattcaccaccgctacaagtgatgccaccttccttaccccagaaagctttgtaaggtaatgcttttgcaattaattcgtcagcagtatacggttcaccactaccaatattccaagtatcgggattatgacagaattcgcaccgcatgcgacacccttgtaaaaaggccacaaaacgaataccagggccatctacggatccaaaagattcgattgaatggacatagccaattggcgcttctgtggtttcttctggtacgactgtttctgcggtttccgttgataaacgggttgtaaatttaattgccatttcttccacctcttataaaagacactcttcctagcaaaactgctaaatcaaaattagcagctttacaagaaagcggatagggttagctatccgctgcctcgtttattcttatgaatgactacatttcatcgaagaatgttcttgaaataacatcatcttgttgttccttagttaaatctgcgaagtagacacagtaaccagaaacacgaactgttaatgttgggtattcttcaggatgttgttgtgcatccattaatgtttgtttgttgaagacgttgatgttcaaatgcataccgtggttaaccatgtaaccgtcgaccatattaactaaggcatctttacgtgcattgtcatcatgacctaaagtattaggtgtgacaccaaatgtatttgaaatcccgtcagttgcataacgataaggaatcttagctgttgaaagtaatgatgctaaagcaccgttcttttcagcaccgtatgctgggttagcaccaggtgagaatggttcgccggcttgacggccattaggtgttgtccctgtattcttaccataaacaacgtttgatgtgattgttaaaacagatgttgataattttgaaccacgatataaatggtgtgtattcatcttgttgtagaaagtcttaactaaccatttagcaatatcatcagcacggtcatcattattaccataacgtgggtagtcaggattttgtgcttcgaaatcgactgccataccgtcttcgtcacgaataattttaacttgaccatatttaatagctgaaattgaatcaaccgcatgtgataaaccagagataccagtcgcaaatgtccggtctaagcgactattcttcaatgctaattgtgctgattcatagtaatacttgtcatgcatgtagtggattgtgtttaaagcattaacgtaaacgtctgctaaccaatctaacatcttatcgtatttacccatgaattctttgtaatcgatgatttcacttgtaattggttggtaagctggtccaacttgtgctttacctaattcatcaatcccaccgttaattgcgtaaaggattgtcttagccaagttagcgcgagcaccgaagtattgaacgccatctgcgattggttgtgcagaaacacaacaagcaatcccataatagtcgctaccccattcgttgcgcatcaagtcatcattttcatattgaattgttgaactcttgattgacacttcagttgcataacgcttgaaaccttctggtaagcgatctgaccaaagtaatgtgatattaggttctggtgcagcacccatgttttccaatgtcttcaagacacggaaggcagtcttagtaacatggtgacgaccatccataccaatcccacacattgataatgttgcccagattggatcacctgagaacaatgagttgtagtcttctgtccgaatgaaacgcaccatccgtaatttcatgacaaaatgatcaaccatttcttgtgcttcagcttctgtgatcaagccgcgatctaaatcacgttggataaagatatccattgttgtatcaatccggccaactgacatcgcagccccgttttgggtcttgatagctgctaagtaaccgaagtagatccattgaacggcttcttgtgcgttcttagcgggtcttgaaatatcaaaaccatagctagcagccattttcttcatgtcttgtaaggcacgatattgttcattaatttcttcgcgaagttgaataactgaatctgtcatttctccgtcgccgacaccgttaaagtcgcgcactttttcttctgctaagcggtcaatcccataaacggcaatccgaggtaaatcagggataatccggccacgtgcataagcatcaggaagacctgtaataatcttgtagtgacgtgctttacgcatatctggtgtataagcatcgaaaaccccttggttatgagttttacgatattcgctaaagattttgtgttgttctggatctgtcttaaagccataagcttctaaggcatcttcagccatccgaatcccaccaaatggcatgaatgctcgtttgagtggtgcgtcagtttgtaaaccaacgattttttcaagatccttatttaaataaccagggccgtgtgatgtgacagttgcaggattgtcgttatcagcatctaaaacaccgcctgcttcacgttcttttttcttaagtgccattaattggtcgtttaaagtggttgtcgcttcagtaggaccagctaagaaactttcatcaccatcataggctgtgaagttttgttggatgaaatcgcgaatatcaatttcatcttgccaatcacccttattaaaaccgtcccaataatcggctaaattgattttttcagtttttaccatgtggattgcctccatttatttaaaattcagtcatacagtttttacacatttagtataacacgtcacaaggtttttgcaaaccctttctttttaaaaacatttaccaactgtcacatgccttaaaacactgctatgtaagtgttagcacttcattttagaataagttttccgttcattttagattgtgcaaaaccttttaagtgttatggtacagatatcgaattttcgcttcttttatataacagaaaaggacactaattaggttaattagtgtccttttgattaatctttatggtttgaaattggttcgctggattgtgctaaaacaaatactggttgaccaacttcttcaacatccatgacgaagctcccgtttgaataacggtcacctgttgcatgtgcttgcggttcaattgttaataatgcctgttcggtttttactaatagtgagatcttaggtgcgacactaatcatagctgccacacgatgtggatcacgttttagttcacgtaggattaagaccccacgccgagcacggcttgttaagccaatttcgcttaagaacatgcgtttaaaggccccacgttgcgtgataattgccacagcagcgtgcttttcagttagatcaaagagcgtaaagttagcgacgtgatcgccatctttaaggtccatcagtttcacacccccggctttggcaccagagactgatacttcgttcaaggcaaaactgagcccgtaaccgttataactagcgctaaagacggcctgttgttgggcatcagtttcagagacccaataaacattcgtcacattcgcaccagcatgtaacttgataaagtcttgggcttttgaacgataagtccgacttggcaataagtcttggaaagctgtttgcttaatataaccatctgtcgtcccaatgacaaaataaccattttgctcgtttggtgtaaagctaaaggccgcaataatcgcttcatcagctgctaagccaattgattgcgaaatatgttcgcccatttctttccacttcaaatcggcaatttcatgcactggtcgttgaatcagatgaccagagttggtaaataacatcaattgatcgagtgtctgcattggcttttgtaagatggcaaaatcgccttctttcagaccaccgtcagctccttcagaggcttgataagaacggagactactccgtttaaggtagccatcatgactaaccgcaaccatgacagtttcatcaatcacagtcacactcgtatcaatctcaagggtttcaatttcggcttcaatttctgtcttccgatcgttccggtaagctttaaccaccgattttaattcagacttaatgacccgtgcaagttctttaggatttcccaaaatagcttggtagccttcaaccgctgtttttaattcagcagcttcggcttccaaggccgtcacatcggtattcgttaaacgatacaattgcaaggaaacaattgcttcggcttgtgcttcggtaaaatcgtattgtgccactaagtttgtcttagcgtcttttttattcttacttgcgcgaatcgtactgattacttggtcaagaatcgatagggctttaacaagacctgcaacaatatgcaaccgatcctgtgctttttgtaagctgtattgtgtccgccgcgtaacgacttcttcttgatgtttcaagtacgcgtgcaaaatttcaagtaagccaacttgtttaggttgcatatcagagatagccaccatattgaagttatacgtaatttgtaaatcagtattcttgaagaggtagtttaaaatcccttggctatcagcttgttttttcaattcgatgaccactgacaagcccatccgatcactttcatcacggacttcagaaataccgtcaaccttcttcaagacccgtaattcatcaatctttttgaccatttgggccttattgacttcatatggaatctcgctgatgacgatttgttcccgattaccgcgtaattgttgaatgctagttttagcccgcacaacaacgcgaccacgacccgtttcgtaagccttcttaatcccgtcaaggccttgtagaatcccaccagtcgggaaatcaggacctttaacaaaggtcatcatcttttctagcgttgcgtctggatgatcaattaaataaaccaacccatctgtgacttcacctaagttgtgtggtggaatctcagtcgcatagccggccgaaataccagttgccccgttgaccaagaggttggggaagcgggctggtaaaacagttggttcttcagccgtatcatcaaagttcaagacaaaatcaaccgtctttttatcaatgtcttttaacatctcactggcaattttgctgagtcgggcttctgtataacgcatagcagctggtggatcaccatccatcgaaccgttattcccatgcatttcaattaatggttcccgtaatttccagtcttggcttaggcggaccattgcttcataaatcgaactatcaccatgcggatgaaaattacccatgacgttcccgacagacttcgctgatttacggaatcctttgtcataagtattgccatcaattgccattgcgtacaaaattcgccgttgaacgggttttaaaccatcccgaatgtccggtaatgcccgttcctgaatgatgtatttggaataccggccaaagcggtcgcccatgacttcttcaagggttaactcttgaattttttgtgcttcatcagccaaattaatcactcacttttctaatcgtctaattattctactgcgttatcgtcggagactggcgttgctgtttgccccgttgtctctaaaatgctgccttcttcagcgagcgtgaatttcacgttttcttcaatccacttccgtcgcggttcaactttatcacccatcaaggttgtaacccggcgttctgctaaagcagcatcgtcaatccgaacacgaattaaggtccgacttgttggatccattgttgtgtcccaaagttgatcggcattcatttcacctaaccctttgaagcgttgttggctataacctttacccatttccttcgcgacaacttttaattcatcgtccgtccaagcataagcaatcttcgttttaccgccggcacctttttgaagcttgtacaaaggtggtaaggcgatatacactttaccggcttcgattaatggtcgcatgtaacggtagaagaaggttaagagtaagatttgaatatgagccccatcggtatccgcatcggtcatgataataatcttatcgtaattgctatcttcaattttgaattcagcgccaacaccggccccgattgtgtagatcattgtgttaatttcttcattttttagaatttcttgtaattttgccttttgggtattcaataccttcccacgtaatggcaagattgcttggaacttccgatcacggccctgtttagctgaaccgccagcggaatcgccttcgaccaagtacaattcgtttttagccgcgttcttagattgcgcgggtgtcaacttaccagagagtaacccgtctgattttttctttttcttaccgtttcggctttgttcacgcgctttacgggctgcctcacgggcttcacgggccttgagtgactttctaaccaaggcttgggcaaattccccattctctagtaaaaagaagctcatttgctcgtaaacgaggttgtcgaccgcggttctagcctgtggtgagcctaacttacctttggtctgaccttcaaattgtagtaactcttctgggattcgcacagataagacggcactgagtccttcacgaacatctgagccttccatgttcttatcccgttcttttaataagttaaccttgcgcgcataatcgttaaacgccttggttaacccggctttcatcccggcttcatgcgtaccaccatcaccagtccgcacgttgttaacaaatgacatgatgttttcggaatagccgtcgttatattgaccagcgaattcaacttcgatgtcttctttagtgccttcaaaatagagtttattcccaatcgtgtctttatcctcatttagataatcaacgaatgattgaatgccctctggataatgaaagacatcttccttagcaggatcagcacgtaagtccgttaacgtaatcttaacgtcctttaacaaaaaggctgattcccgtaaccgttctgctaacgtattgtaattatacgttgtgacttggaaaattgatgcatccggtttaaaggtaattagtgtcccgttaggttcgttggctttaccaaccttttttaaagtgcccactggatggccgccgttttcaaagcgttcttcataggcaacgccgtctcgaaccacccgaacggttaaccattcagataacgcattaacaacactggccccaacaccatggagccccccagacgttttataactattctgagtgaacttaccaccggcatggaggaccgttaagatgacttcaatcgttggaatccctgattgatgcatccccgttggcatcccccgcccatgatcacgaacactaatactattgtccgcaccgattgtgacgttaatttcggcaccaaaaccggcgagtgcttcatcgaccgcattgtcgacaatttcgtatactaaatgatgtaacccacgcccatcggttgagccaatatacatgccaggccgttttcgaactgcttccaagccctctaagacttgaatcgaattatcattataatcttgtttttgatttggcattcaacaatgactcctttgtctaaaaatgaacagataagttatattatcaacaaatttgaacgattttacaatccctaaatttaaaataaccacttatccaaatgtatgttcgcattcatctattctaacatacaatattccttttcccttgtcaaaatgctagaatagattaatcaaatgttgtgaataggagttctgacaatgaaattaagtcttatttttatcttggcctacctgattggctcgtttccctcaggcgtcattatcggccgggtcttttgtcataaagatccccgggatgctggcagtcataatattggaacaaccaattcttaccgggtattaggcccaatcgctgggacggctgttttgttcctcgatattttaaagggtactttagcagccagtctaccaatgatttttcacacctctaatcattcattggtcttagtcgttggtttagctgcggttattggccatgcctactctatctttttacgctttacaggtggcaaagccgttgcaaccagcgctgggatcttactggcctacaacccgcttttcttcgtgatcgctagtacgatttttattagtgtcattttaatcacgagtatggtcagcatggccagtatcatcggccccttgctaattgctatcttgtcattttacacacacgactggttactcggtacgattgcgacgttagttctaatctttttaacctaccgccatcgcgagaacatcagtcgcattaaaaatggtacggaaaacctagtcccattcgggttatattaccgttataaacaaaaaaaacgccaataaaggcgtttttttgtgcgatcatttaaagatcaattaattgttcgcggtcattataaaatgaatgataggctaagtagcaggcaataactgacccgagactcgttgccgataatagcatgaaggtgactaatatttgatacataatagctttaaccggatcaacaccggcaaagattaaccccgacatcatccctggaagactgaccaggccgaccgtcttggctgaatcgattgtcggtgacatccccgttttaatactttctctcacaattgcaattgaggcttgtttcaagctagcgccgagtgccaagcgttccaatacggcttggcgttgatccttaaactgcgtcaacatactccgatagctcagaccaatggcaaccatcgagttagaggcaatcatccccgtaatcgggataatctgcgatggcacgaatttaattgcgccggataatactagtaggccgagtgtaacaccggtactcgttaaaatcgcaattaatgaaatgccaaacgcgtgtcgtaacgtactagcacgtttacgagcgttagccgccgcgttaaagatgatgatcaacatcatcgctagcgttatccaaacatggttaatttgaaaaatgaatttcaataaataacccacgataattaattggacaatcgctcgcccgacactgatcaacatatctttttcgagaccaattttttcgtgaaaactaatgattaacgcgacaaaaactaacgaaacagcaaaggttaatgataacccattaacggctagattcatctgcatgtaccaaacgaccagctacaatttgaagctgacgccctttccgttgttgttcttgtgtatcatgggtaatcgacaagaccgtaatcccatcttcttgattcaaatgtgtgattagcccattaaccaaggatttagtctgctcatctaggccggtcgtaatttcatccagtagcaggatttccggtttaaacatcaggttacgaattaaagcaattcgttgcttctcgccccccgaaagcgttgtaatctttttagtcaagggcatctccgctaacccaactcgggctaattgcgtctgaactagcgtctcatccactggtaattcgcgaatttcaaacggaaatactagattatcaccaactgtcgtcccaaataacgttggttgttggaagcaataagacacgcgttgccgatattgcgtcggtttatagtcgctaatggcctgtcctgccaacaaaatctccccactcgttggtgtcaataaatcggctaatagccgtaacaacgtactcttaccactccctgatggtcccacaatcgtattataagacccttgttcaattgtgatattaatatcgctcaatattgcttggccatcaacgctataattaaggccctttgtctctagctgaagcatggtaccctcccttaaatctgtcattacttctagtatacgcgaatttttaatttttagggtaaacgatgattgataagtagcgcgagtaacgcttatactagcaatagggactcttagttgatatcgccaattaagctgaccacaaacttaagaaaagagatggttacaatgttaaacagcttcccccaagtcatgacaatcgccggttccgactctgatggtagcgctggcgcccaagctgatttaaacactttcttctcccgcggtgtttatggcatgagcgttttgaccgcctgtgtcgctggtaattcatttggaatccacgcgagccaagcgctgacccctgaatttatcaacgccgaatttgaagcaattgccgccgattttaaggtccgagcttgcaagaccgggatgctcaccgatagtgagacgattatgaccgttgccaagcaactcaagcaacacgattttggccccttggttttagacccagtcattatcacaaaacatggcgcactattacttgctgatgaagcctaccagacgctaaaaaccgaattgattccaatggcgaccgttttaacccctaatttctatgaagcccaaaaactaaccggcatttctttgaatgaaccgtctgatttccaagcagctgctgaaaatctactggcgctaggcgctaagaatgtaatgattaaaggccaccacgctgctggtcaatcaatcgttactgattatgtgcgactagccgatggtcaagaattctggttatcagaaccctatatcgaaacgacccatattaatgggacgggtgattctctctctgcatgtatctgcgctgaaattgctaaggggcactcgatcgaagaagccattaaaacggctaaaaaattcgtacacgccgccattgctaatccaatcgacgtcggccacaaatacggtcccatcaatcctcacgtgcaataaaagcattttcccttattagccgctgcataacgactgataaggttgtcctaaagcttaatcggcaacacgattattaatcatagctacttttcttaaatcagtgcgtacaggccacttaaggcgataagaatagcaaacccgtcaaacgttacttaaaacgtctgccgggtcttttttagtgttctgcttcttcaatatcggcgttgattgccttcaaatcaaaatcgctatttaaaaagtcagtatcttgactgggaaaatgttgttcaaaggtctcaaaaggttgcacggttaattgggcgtcttcaatcacataatctaagacgtggcccccaaaatcgtgcgccgtgtttaagaagtgcacgtgataacccgcaactgcggccccttgatagagcgttggtgcgtagtaaccaactagcgtgccagtcacgccatcttgctcaaactcgggctgcacgcgcgttgcatccgtcaaattaggataaggttcttgttgcgcctcaacggcacgcgtatgcatctttttaaagcgaccggttaccttaacggcaaagaagaggttcttcaatggctgttgtgctaagatctgcgcttcaagttccgccttagtcactgttccgagtgtttggttcggtagttcaggtgcttggaaatgaactgtcgcaaagggcaccatgtcagtgggggcaagttgattaacctggccctcaccggttacttggtaggcttggccatccaagataatcatttcacctgctaagccatgcgccgtgccgataccaaaatcaccatgggttaataaatcggcaaccgacaaagtcccggtaaataaaccgggtaccaatagtgccaatgtgccgtgttgataaacgcgttgataatcaaatgtcattttatacttcctccttcacaccaatcaaaaagactaaacgagttgatctggtaataaggcttgaccaagtagcttattatcactgtaatcgactggaatatcgacaatgactggaccatcagttgcaaaagcttggtctaggactttacctagatcggctgctttttcaacacgtaagccagtagcgccgaagctttcagcatatttgacgaaatcaactgggccaaattgaacggctgctgattcgccatatttcatttcttcttggaacttaaccatgtcatagtaaccatcattccagatgatatgcacgatatttaagttcaaacgaacggctgtttctaaatcttggcttgagaataagaagccaccatcaccggaaactgaaacaatttgcgtattaggacggactaaagcagcactaatggcccatggtaaagcgacgcctaatgtttgcatcccgttactaaagagtaaatgacggggttcgtaacttctaaagtggcgtgccatccagatataatgactcccgacatcgaccgtgactgtcatttcatcagtcacgcgttcttgtaactcagacacaatgttcaatgggtggttgagcgtcttatcgtctgacatttcaggtgctgtatcccgttggtgtaattctgcgtggagttctttgaggtagtcacgaacatcatcggctaattgatagcccttcatgtatggtaataagaaatcgagcgtttgtgcgatatccccaactaattccttttcaggttggaaattatgatcaatttcggcacgcatatcatcaatcaccatgatgtgcgcatcactttcggcattccagttacgtggttcgtattcaattggatcgtagccaatcgcaattaccagatcactacgttttaagattcgatcgcccggttgattacggaataatcctacacgaccgtaaaaatcagtttctaattcacgtgagacaaccccagcggcttggaaagtttcaacgactggaatatgtgtttcggcaattagattccgaatagcagctgttacttcgggtgaagatgctcgcatcccaactaataacacggggagtttcgcttctttaatccgttgggctagtaaggttgtttcaatcggactagccggccctaatttaggtgcgattagaggcttaattactttggattggaccttagcgtccgtcacatcttgagggacactaacaaaactggccccttgtttagctgattcagcttcttgataagcattggcaatcacttctgataagttttcaggttcttgcacttctgcactaaacttagtaattggtgcaaagagcgctgcattacgcatactttgatgggttaaacggagtaaatcagcccgtttcacttgcccggcaattgctaagaccggatcaccttcagcagtggcagtcacaacacctgtcgctaggttgctagcaccaggaccagatgtggccattacaacgcctggcttaccggtaattcggccgataccagctgccataaacgccgcattttgttcatgacgcgctaaaattaattgcggcgttttagggttaacgggatgttctagtcgttcaaacacccggtcaatcttggcaccaggaataccaaaaacatattctacttcatgatttactaagctatcgataattgcatctgcaccgtagtactcttttttatcagtcatgatttccctcacttattgtttaataattattatcttagcatgcaatctatttaaaaactagcacgtttgcttcgtgtaataccgagcaaaaaagcgcttctctacgagaaacgctttatattaactatttaactgtaatttcgtaactggcattaaatacttcgccgggtgctaattgattgacaccaaatttttctgaaagttcaccagaagcgtcaacatcatctgcaatcccccaccaaggttcaagacaaactaattcgccttccgttgggtaaggtgaccaaacaccgataaatggggcgcctgatactttcaaactgatcgcatgatccgttttttcagaacgaatgctaaatttattttcttgaccctttaattcgtaaattaaggcatcatctttgaagagtgagtgattaatatcagtcgccacatccgttggtgctaatgtgcgttcatttagattgatgaatgccccttgcaatggaatcttgacgcgtgatttttgtggtcggtagtctaaaaagtagtcttcaaattgggtatcgtccgttaatgggactttaaagccggggtggcccccaacagaaaagtacattgggccagattgcgctgtatttttaacatcatagcccacttttaagtgcatgtcgtttacttggtaaaaaacgcgcagttcaaattcaaatggataaatttttaaactttcttcatctgatttcaataagaatgtcacagccgtatcagtttggctttctacttcaaattgacgatcacgggcaaagccgtgttggcccattgggtaagttttaccttgatacgtatattgatcattcttagaacgcccaacaaacgggaataaaacgggtgcgtagcgcccccaaactttgggatctgcttgccagagatattctaagcctgaaacagcccctttaacactctgtaattccgcaccttgtggactaagtgtcactgttaaaaattcatttgcaatttggatcatttttaaaaccacctttagaaatttatagaataaagcgggttaaatctttatcggctacaatcttaccaattttatcattaacatattgttcagtgatggtgatatcacccatctgcatatctggtccttcaaagagaatgtcttccaacaatttctccaagatggttgccaagcgtcgcgcaccaatgttttcggtgtcgtggtttacttggaaggcaattgcagcaattcggccaatggcttccatcgtgaaggtgacgtggaccccatctgcaccgattaaagccatatattgcttaacaagcgcgttgttaggttccgttaagatccggacaaagtcggcttcagttaagtcttctaattccactcgaattggaaaacgaccttgtaactcagcgattaaatcacttggtttagattccgcaaaagccccagaaccaatgaagaggatatggtctgttttaagtaccccatatttggtattaacttgtgagccttcaacgattggtaaaatatcgcgttgtaccccttcacgtgagacttcgccagattgtttcttaccaccggcagcaattttatcgatttcatcgataaagataatcccggtattttcggctctttgaagggcatcatgataaatatcggcatgattaaccaacttgtctgattcttcttgaatgaagatttcacgcgcttctttaacggtaacggttctgaccatcttctttttaggcatgattgagcctaatgtatcgttcaagtcaattcccatttggcccatcatatcgttcattggtgcggcctttttaggttcgtcaacttgaatttcaatttcgcgatcatccaaaagccccttatcaagttgctccttaacagataaccgttgatcgcgtacttcgtcggttacttcttcggtttcagcttggtttaaaccagctggtgtttcaccattttgaagggccgtgaacatcgacattaagtcgttcatgctattgttatttttacgttgttccttcttgataccagggactaataattttactaagcgtttgtctgcttgacgagccgctttaccacgcacattcttgaattgttctgattcttccatgtgaacagcaacatccgctaagtctcggaccattgattcaacatcacgaccaacatagccgacttctgtaaatttagtggcttcaaccttgattaaaggcgcatcaacgactttcgctaagcgacgtgcgatctctgtcttaccgaccccggttggtccgatcatcaataagtttttaggtgtaatttcttgttgcatcttagtgcttaattgcatccgacggtaacggttatataacgcaaccgctacggcctttttagctttatcttggccaattacaaacttgtctaattcagcgacaattgatttgggtgtcttattcatcaaatccatctgggccacctcctaaaatgattccacaatcacgttgtggttcgtataaacatcgatgccaccagcgatattcacgccagtttcaacgatttgttctgctgttaattcgggcttaccttctaaaatcaaggctgttgcagccgcttgggcaaaattaccacctgaaccaaccgcaatcacttgatcacctgattcagcaagtgtatcaggggtaatgacttcaccgttacctgagatcaaaagaatatctgtttcgttaatggcaatcaacattgcttctaatttttgaagcgttggatctttacgccagtcctgtgccaaggcaacagcggcgtgttgtaaatcacctgagtatttttctaatttttgttcaaaccattcttgtaacgtaaacgcatctgcaacgccaccggcaaaaccaattgcgactttattgtcataaatccggcgaatttttttcgctgaatcttttgtgacgaatttttcgcccattgttacttgtccgtcgccagcaattgctgttcgaccattatgttttactgcacaaattgttgtcatttgatttgctcctttaaatagcgttaatcacattttagcagtctttaagactgtgtgctaattctatcgctcttttttgttaaaaaaatcgttctttagtcctagtttttagcccgtgggaagaactgacggtaatccttttgcaaatgggccgtcgtcacatgggtgtaaatctgggtcgtcgataagctactgtgacctaataactcctgaaccgttcgtaaatccgccccgtggtctagcaagtgggtcgcaaaggtatggcgaatcatatggggatgaatcccactggttaaacaggtctttttatccacttgatccaatgcgtattcaatcccccgactggtaattggattccctaaatgattgacgaaaaccacatcgtgttcttgctggcgtttggccatcaattgcacccggccatcgtttaaataatcctgcaaagccttagtcgcgtgattgccaaaaggcacgtaacgatccttattccctttaccatgtaccaaaataacccgtaaaccaaaatcaatctggccaatcgttagttgggcacactcgctaacccgcatccccgttgcatataataactccagaatggcgcgattacgttgcgtcagcggttcttgtccgacaatcgcggcaaataacgcatccatctctttttcatagaaaaagcggggtaacttatggcgttgtttcttgagttggaccgtttcaaacggatcagtctgtaaaaattcgttgcgtatcaagtagcgataaaacgaccgcaaacttgaaatccggcgtgcaatcgtttcgccactatattttttttgatccatttcattcaaataagtttgtacttcaagggtaccgacctgtttaaaggaggtcaggcccccattagcggccaaaaaatcgacaaacgccttaatatcggcttgataggccttttgcgtttctggtgaatagtgtcgatcaacaattaagtattgtaaaaacaaattaatccaatcttgttcaagcgccaaaaaaatccctccaagcttggttaataatactttaccacaagcttagcgggatttaaaaggtgtttacctagagtgtttctttaaatgtgtcaatacttgctaacgcacggtctgcaagtgcttgattccgttcttttttatcgcgaattcgttgttttaagggttcgaaaattccgaagttcgcattcattggttggaaatgtttggcactggtatgcgtaatgtaatgtgccattgaacccattgccgttgttgctgggaaagtaactggttctgtgtctaatgctaaacgagaagcattaatcccagccactaagccagaagcagcactttcaacatacccttcgacacctgtcatttgaccggcgaagaataaatcagaacgttgttttgattggtaagttggtaatagcacgtctggtgatttcatgaaggtattacgatgcataacaccgtaacgaacaaattcagcattttctaaacctggaatcatccggaaaacgcgtttttgttcgccccacttcaaatgagtttggaacccaacaatgttataaagacttgcagcggcattatcctgacgtaattgaacaacagcataaggttgttcaccggtcttgggattttcaagcccaactggttttaaaggtccgaataacattgttttgataccgcgttttgccatgacttcaattggcatacaaccgtcgaagaatttttcatcttcaaagtcgtgcatttcagcaacttctgctgaaatcaaggccttataaaaggcttcgaattccgcttcagtcattgggcaattcaagtaagctgcttcacccttgtcataccgtgacttaaggtaaactttatcaaaatcgatactgtttttatccaggattggtgcagcggcgtcgtagaaatacaaaccttcactaccgtttaacgcactgatttcttctgctaagccaggtgacgttaatggaccagtagcaactactgtagggccttctgggaaagcggtcaattcttcgtgatgcacggttacccgttcatgattagcgagtttgtcggtgaccgtttgtgaaaatggtgtccgatcaacagctaacgcaccaccagcaggaacggcattttcgtccgctgcagcgataataattgaatctaaacggcgcatctcttctttaatcaaaccagccgcattcgtgacttggtttgcccgtagtgaattggtacaaactaattccgcaaattgttccgtgtgatgggcgggcgtcattttaaccggccgcatttcgtataaatgaacatcaacaccgcgtttggcgatttgccaagctgcttcggaaccagctaagccggcaccaatcacatttacaaaaggttttgtcgtcatctaattacctcaaattttctcttatttttgaacggcttcttcataatcaccattaggacagatgacttgtttgccgcctttaattttcttttcaactaagtagtgttcacacttaggacagtttctaccgaccggtttatcccatgtgacaaaatcacagtctggataacgatcacagccgtagaataaccggtttttcttagatttacgttcaataacttgccccttgccacacttaggacatgtcacaccgatttctttgacgattgccttggtattacgacaatctgggaagcgactgcaggcgaagaacttaccataacggcccattttgaccaccattggtgccccacaaatatcacaatcgaacccagctggttcatctttaatctgaactttttcgatttgaacgctagccttttcaacttctttttcaaaaggttggtaaaaattatcaataatcttgatccaattttcttggcccgtttcaacttcatccaaacgatgttcaagatcggcagtaaagtcgatgctgacaatatctgggaagaattcgacgattaaattattgacgatttcacctagttcagttggttcaaatcgtttggcattcaacttcacataatagcgtcgttgaatcgtttcaatcgttggtgaataggttgagggacgaccaacgccgttttcttcgagcgctttaaccaagttggcttcagaataacgtgcaggtggttgtgtgaaatgttgtgctggatcggttttagctaatttcacttcatcgccaaccgctaattcaggtaataagttatctttcgctgaatcttcggtatcgcgggatgaaacgtatagcttagtaaatcctgggaagcgcatttgtgacccattagccttaaataagacattgttttgattaatcttaaccgccactgtatcaaagacagcgggtgtcatttgactggcaacaaatcgtgaccaaatcaagttataaatcttatattgatcatttgttaaaacgtcttttaagctcttaggtgtccgcatcacagaagttgggcggattgcttcatgggcatcttgtgcgccttctggatttttcgtcttgtgggctttaacagcggcgtattcttcaccatagttatcgtgaatgaattgtgacgcttcgtgtttggcacccgttgaaatccgggttgaatcggtacgcatatacgtaatcaacccaaccgtgccttctttacccccgagattaatcccttcatataactgttgggcttgcatcatcgttttacgggttctgaagtttaacttccggttggcttcttgttgcagtgaactagtggtaaaaggtgccgccgcaaaacgcttgcgttcacgctttttgacatcttcaattgtaaaaggttgcgtcttatcaatttgctttaagacatcttgaaccgcatcgttattgcctaaggctgctttcttaccgtttaaaccgtagaaactagctttaaacttgctgcgccccttcttgaattcggcatctaatgaccaatattcttcaggtttaaaagctttgatttcttgttcgcgatcaattacgagttttaacgcaactgattgcacccgaccggcactcaagccttttttaactttttgccaaaggagcggactaattgaatagcccacaatccggtctaatacccgtcgtgcttgttgagcatcgactaatttcatatcgatactacgtggatttttaaaggcactcttaacagtgtctttggtaatttcattgaagaccacccggtttttatcagttggatctaattttaaaatatgcgaaacatgccatgcaattgcttccccttcacgatcgggatcggctgctagatagatatgatccgcttttttagcgtgtttctttaattctttaattgtttcgcctttaccgcgaattgaaatatatttaggttcataattattttcgaaatccacacccatttgactcttgggtaaatcgcggatatgacccttacttgcaacgactttatagttgcgtccaagatatttctcaattgttttggcctttgcaggtgattctacaatgactaaatttttgcctgccatggacaaacccctttcaacagaacgctttgttcaaaatcgtacataataatatgtgacgtgggcgccgtttgtcaaatccaaacgggcgctagtgattatcagattaaagcatagcataggtttcccagtattcaaaggaaacttatcagaaaaacagtggattataacaaattcataaccaatcctaccgcactaaaccacaaaaaaacaaggtgtgataaaaaataatttttatccttaccttgtttttttaagcgttgacttgcgcactattagctaagatatctgcaataatgccggccaacttaatttgtgccatctgatcttcagccgctttttgaacctgatcataagcgtcattcaatgccgattgaatattagcacccaccaaacactgcggattggtcttttcatcgatgtgcaacaattgctgatcagtatcaagcgcctgatagacatctaaaacactaatctgctctgctggccgggctaatttaggcgcaatcgtccctggacgactctccaataagtcagctttcaccaaaagggacatcaaccgacgcactaagctcgcgttggattcgatactgccagcaattgactggctcgataagtccccatcttgataaatttcgacataagctaagatatgaatggcatcacttagtttgtgggaatatttcatcgtttaacctcaatttcaaacggattctctactttgattctgctggtaacaattcttgaagggctgcggttaatgatggtaatggtcgacctaagacatctggtaaatcacttgaaacttcatctaattcaccatcacgaatcaagctttgaatcatcgtaacaacaccaacgacttcagcaggtaaaccacttgcttcaagccctttttgatactcagcaatacttaatgatgataccgcaaattcttgattagtcaattgtgcaacactttcggctaaatcagcataagttgcgggtgcaccagcgaattcataaatgtcttttgcatcagtcatggctaataccttagcggctgcttcagcataaagacgttcaagtgtccaaccaacatgactgtcaccagcgccataaacaaatggttgaccggcaatagcacctttaattgtatcgagttcgttttcaagataccaattattacgtaagaaagaatgcgcaataccagattcgataatagccgcttctgttttacggtggtcttcagctaaaccagaagttgtttggtcagcgtgggggaaacttgtataaccaatccagttaacaccggcttttttagcagcccggacaacggccatatgttgttgatcacgtgggacttctgcgcctggttgcgatgagatgaatagtaggcgatcaacaccttgtaatgagtctgctaatgttgcttcttgtgtataatccccagggcgaacggtaacgtctgctggcaccatcttttgggctttttcaacgttccgtgccaaaccaataatatctgaagcaggtactaattttgctaattcgtgaacagctacttggccaaaacgtcctgttacagctgtaattgcatatttcataatttaaaatccccttagtggtttatttgttactttataagtaacttgttgttttaataataacaggagggattatgaatgtcaaccaaaacagtttcgcttaatcaaaataacgtagttcttctattaatatgtttttatctaacaatggtgtcgctcccgcggcgattaattggttgcacccctgtgacagtgattgatcaatgcgccccggaattgcatagacattgcgattagcttgaagggccaagttagcggtaatcaagctaccactcttgtgccgggcttccgtcacaattaaactatgacataaccccgcgatgattttattacgggctggaaattgatagcgccgggctggtgtaccaagagcgtattcagataataacaaacctttttcagcaactacctgttgtaaatgctcattttgtggtggataactgcaattaatgcccgtgccaatcaccccaattggggccaaaccacgctgcaaggcaacttcgtgggccatcgcatccgctccttgtgctaacccactaataatcgtagtggcagttagtccttgtaataactgttctagtgattgtttagaataatgagtcgcttgacgcgccccgactaccgcgagacatggctgttttaacaatcttaaatcaccacgataaaataacaaaacgggcggcaaataggtttccaataagcgttgtgggtaatctttatctaagatggttaaataagtcgttcgaacttcatgttcgatgcattggcgttgtaaggttgtactttgaaaacttgcttgaaaagtcggccaataacgttccggcaagcgcgtaatctgcgcaatttctaacgccgataacgcccaattatgactggttgctagccacgccgccaagcgtaattcactaataggcccaaaacccgccgctaaatgtacttttaagagtaattgatttttagttaacacaaaaacagctcctttacgttaattaataatccgtaaaagagctgttttatttttctataaaacgttttgaacaggggaaaaactgcgacgatgaattggtgtaaccccgagttcagcaagccccgctaaatgcttagctgtcccgtaccccatattgttggctaaatcataacccggatattgttgatcgtaattaatcatcaattgatcccgaatgacttttgcgacaatgctggctgaggcaatactaatactgcgggcatcgcctttgattaatttttcttggggaatatcagtcggtacggtcattgcatccactaataagtagtccggttgtttatccagaccagcgactgcttcacccattgctaattctgttgcgtggtaaatgttttcggtatcgatccgttcaggtgacgcaattccgatactaacactgactgcctgggccataatctctcgatacaactcttgtttgagcttaaatgacagttgtttggaatcattgacctgccaaagatcaaaatcatggggcaaaatcacagcggccgtcacaacgggcccggctagtggtccacgacccacctcatcaattccggcgaccaacggataatcaggccagagcgctttttccatttgacgccgttcttcaaaagctgctttttgagccgctaattttgccgctcgcttatgatattgaactaccaatttctgaacaccggcccgcgaatcagccgcaaaagtggccaactgctcttcggtcactggtgcttgtaataattgcttaatttcagcaatcgattgtgctttggtcatcttatgacgcctccactgggacaacgtctaaagtgaagcgacctaatttaccttggcgcgcatcattaatgaacttcacgcagaaacggtcataatcttctttgaagcctaaccgtttggttaaaatcatgattaattctgcagctggttcttcaagttcggcatctgtcaccttataaactttttgaagttgacttggataatattctttgaagtgttctaaggcaaaaataacgacatcatctggatgatagatggcatctgaaatcgcaccggtaagggctaatttactgccgattgttgggtcttcaaacttaggccataaaacccctggtgtatcgagcaattcaagtgtttgtccggctttcaaccattgttggttcttcgtcacacctgggcgattacccgttacagcgatattcttttgaactaaacgatttaaaatcgttgatttgccaacgttaggcacgccgacacacatcgcccggatgaccgggttacgaatccctttagcacgttttttagccaatttttcagctaaaatttcttgtgctactttttcgatcatgggtaacttagccttatgctgtgcatcaagggcaattgcggtaatgccgcgtttcttgaacgtttcaatccattgttgtgtccgtcgtggatcagccatatcggccttattcataattaatagaatgggtttgttttgacctaattcttgaatcattggattaattgaagattccggtacacgggcgtccacaatttctaaaattaaatcaaccgccttgagccgttctttaatttgtttttgtgctttggccatgtgacctgggtaccattgtattgtcataataactcctttattactgtttaagatgaatacatctcttaccgatagtattattcttaattctatcatacctcagcgcgaacttgacggcttaaattaaaaaggttacgacccgcagtcgtaacctttctcgtttatttaaaataagtgatatcttcaaacggccaataaacgcctactgcgcggccgataattgtttcacgttcgattatgccaaacgtgcgactatccttgctaattcgacgattatccccgagaacaaagtattggttagccggaatccgatcgtgatccgttaatgtttttaaatcaaaatcggaggttaaaaccgtcttttgctgcgattgcttcaaaaaaggttccacgactggccggtcattaacgtataattggccctcttgataagcgatatgctcacccggtagaccaatcacccgcttcacgtaagtggtcccattggctaagcgaaaaacaacaatttcaaagcgatggacctgcccaaactttttcaataagagttgatcacccgatttaagggttggttgcattgaattcccagcaaccgtcgccggcaccaaaaagaaggaccggatgacaaaagcaaccagtccggccacgagaattgctaaaaaccaattacctgcgattgctagtttccgtctcattaaatcgcctcaatcactgttttactatgcctgttcgctttcttgatatagctgataggcctcgtcaaaaattagcatgctcggtaaataactaccgtttaactccaaatattgggataacagttcatagtccccttcatgtttagggaatgattgatcgaagaaagcattgttggcaaattgcgcaactggttcgtagttattcggatcgcgttgtgtcatgagataccgatagaaactctgcttcattttgcacaccttatttcttattttttagtggcacgtatacggataaatcaatcttatcgttcttcaaatcaatatggcgggccttgacttgcatcccgttagctaacttaaattcattcaagcgcaaggtaatgcgactcttatgcgcatttaaaacaacccatttagggaatttatattgacgttgaatgtaattaaaaacaaatgacatcggtactttcagttgaccgacagctaattgcttagcacgtagttgaatatcaccgttttcaagcacatatggtttgaaaaagaggttgaattcgaccggaaagcctaaaaatttgaattgaccagaaagaattgcttgttgatctagggtaaagttgtacttcacctttgaattctcgaggtagttttcaagataataggccactacactattaatttgcttcttgtgcatctgaatatcaaaggtactgtcagctttgatcattttttcagtctgaacttgcttagtttgcggtgcactaacgttataggcgataaaaccgagcgtaccaatcactaatgctagtaaaacaataaagctatatttccaataattaatcgttcgtttaggactaacttgttccttttttaaatcttgtctggtttgcattaactaacttccttacttggtccaatctttttggtgtgcattcatctgttgccaaaaagcgttggtgatgagttgataccctttttgattagggtggaaatgatcgtcgtcgctaatatagggattgagatgctcgttttctgcaagtgttttttgcagtttactactgtccattttagcgagcgattttgtttgtttcacataatggccgtcaccatgcgttaaaagacggtcgctattgatataataagccgactcaaagtcattagcaacttctttgactgtcttattccacgctgtcacggcttttgacatccccgtaatctctgggaagtaaacgtaaaatggattatagacccccatcacgaaaattggtgccgttggattttgttggcgaatttgtctaaacagcgtcatcaaatgcgtttggtaggccttttgcccggctgtaatctgtttttgatctaaatccaaaaagttattttgtaagaccgccattaaatcattgccaccgacggtcagtgtaatgatgtccgccttttttaaattcgcttgtagcgttggttgcgtgcgcacccttttttcaatctgaacactagtatcaccggtaacaccatagttttcggttgcaacaggatggcccgtttcagttttaattttagcagcaatccgcgaaacataaccttctttattttgctcatcaccaaccccgtgggtcaatgaatcgccgactgctactaaatgcagtgtttttttgactttctttggttgaacgactttcgttttctgaacactttcttgatgactacgtactttcattggacgtggtgtcaataactgccaaacgataaagacgacgagtaataccccggcaaatatccctaggtcgatcaacaattgtcgtatttttttcatatctggcatcctcatatctctttagataatagttaaggctgggacaaataaatgtcaaccagccttagtcataaacttcttagttttcagtataatacatcactgcaaaagcaccggcgcccgcatgggttgcaatgactggatcagtggttcgtactaaaatttcgattgctggaaaggctgcttgtaattgcgccttgatcttttcactgagttccaaaccatcggcgtgtgaaataccgattgctttaacattttttaactttctgagatcatcatccatttcatcaatgaacttcgtaatagtcttcataccgcgacctttacggagcaccttaagctcactatcagcaacttcaaggattactttgatgtttaataaacttgaaatcaccccggctgcatggcttaaacggccacctttaacaaggttggttaagtctgtgacacccatgtataatttcgtattgtcatgaactgcttgaatagctgctaaggcatcttctaatgaaccgcccgcttcaatcacttccgctgcttttaaaacttggaaggccattgcacgatctgtaaaatcactatcaataacagtgacgtcagctttagccatttcgccagcttgacgtgctgtatcaactgtcccgctaatcgcacgtaacatatgaattgatagaatttgactaccatcagctgctagttgttcgtatgtttcgataaaattaccaatggctggttgactcgtcttaggaagcgcactagcactagccatttcagtcataaattgatcacgtgtgattgtttcaccatcaatatagacggtattgtcaatcatgatggtcaacggaatcaccgtaatatgatgttgtttaatttcttctggtgttaattgaattgatgaatccgttacgattttaatattagccactactgcttcagccacactttctatctcgaaacaggcccatatgcggaccgctatttctatgattatatctataagacagtatatcaaactacgcccattttttcagcaaaagttactgagaaaaaaagcgactgtttatcctagcataaaaaaagataccctgcttaatcgaatcacagggtatcttgaggtgtttttatttagtgattctttgataaatctcaaaggtatgtgggtattgattacgttcatcaaccgttcctgcttgttgcgaaattaatttaaattgcgtgtagtcaattgttggcatataaacatcaccttggaacttgtcagcaatcttcgtaacgtataaatagtcgacattagccgcaaaaagtttaaaaatatcagcaccaccgataatgaataatttttgcatggggtgttctttttgataatcaagcagttgtgtacgctcattaaaaactaaaacgtctttagcaactgtcaaaccgctttggcgtgtaatcacaatgttttgacggccaggtaacggctttttaggtaagctgtcatacgttttgcgccccatgataactgcttcgttaatcgtttcgcgtttaaagttggctagatcattcggtaagcgccaaggtaaatgtccgtcttgaccgattaagccgttttgatcttcagcccataaaaatgctatcatctgctacctcctataccgcaacaggtgctttaattgcgggttctgattcataattttccactttaatatcagcaacatcaaaatcaaaaatgctcttcttatctgggtttaaccataatttgggtgcagcatgcattgatcgtgccaattgagtcttcacttgggtcacgtggttactataaatatgtgcatcccccagagtatggatgaattcaccgacctcaagcccagtttcatgagcaatcaaatgcgttaataacgcataactggcgatgttaaacggtacaccgaggaagacatccccacttcgttgataaagttgacacgaaagcttaccgtcgttgacgtaaaattggaacatggtgtgacaaggcggtaaagccatactaggcacatcttctggattccaagcagacacaatcaaccgtcgtgaatcgggattcgttttaatcatttcgatgacgtttttaatctgatcaatggtttcgcctgaacgtgtttgccaagcacgccattgcttaccataaatatcacctaattcgccgtattgttttgcaaatccttcgtcggctaagatccggtcgttaaataggcgcatttgttcttgataaacaactttgaaatcagcatcgtcttgagcccggtgactgaaatcggtcatgtcaggaccggtgtaatcagtacttttaacgaagcgttcaaatgcccattcatcccaaatatggttattatgttgtaataaataacgaatgttcgaatccccttttaaaaaccacaagagttcactcttgattaagccaaaaggcaccttcttcgtcgtcaataaagggaatccttcttgtaaattaaaacgcatttggtagccaaagaggctataggtaccggtattagtccgatctcccttgtagtgaccctcttctaagattgtccgtgctaaatcgaggtatacttgttctgacatggtaaactccctttttgatagttgtaataacgtgctagtgctcggaacataactgggctgaacacacttctcttctttaacgtgctttttgaaactgactcttacgcttaaccatatttgtcaaatcagcgattgcatcgctaatccgccaaatccagttaatgctcagagtcaaaccgtttcaaacgcacttctttagtctgcgtattcgcttaggtagtcccagcgcgccattttttcatctagttcttgatttaaacggtctaactcagcttgccattcggctaatttaccgtaatcagcaccattttgattcatctcagtcttgattgtttcgatttgttcatctagcttttcaagatctgtttcaatatgggcgtattccttttgttcgttatacgttaacttatgtttagcggctggttccttaaccgcttcgacagtgacttcaggtgtgggcttaggtgccgttacctttgtcgttgctgttttttgtttagccaagtagtcactaaacaagccgacttctgtcgtaatattgccgtgaccatcgagtactaataatttatcagcaacttgatctaggaaataacggtcatgggaaacggtaatgacggtcccgttaaagttttcgagatagttttcaagaatcgttaatgtcccgatatcaaggtcattagttggttcatccaataataaaacgtttggttgttgcatcaataattttaagagatacaaccggcgtttttcgccaccagataatttctcaattaacgtcccatgtgttgaccggtcaaagaggaactgctccaataattgcgtgacactaatccgatccccatttttaccgacaacttcttcaccggcttcttggaggtaagcaatcacccgtttatcaagatccaaatcttcattttgttgcgtataatagcccaagttaaccgtctcgccgacgaccaattcaccactatctagcggaattcgttcagctaaaacatttagtagtgaagacttaccagcaccgttcaccccagtaatcccaattcgatcattagcttgcactaacaagctgaaatctttcaagataggatgagcatcaagtgttaagttagcgtctttaagttccaagaccttcttgcctaaacgtgattggcccatttgaatatcaacttcggaagtatccggtccagttgtcagattgcccttcaaatcgttaaaccgattgattcgcgcttgttgctttgtcgttcgagctttagccccggcgcgcatccacgtcaattcttgcttatagagttgttgttgtttgtgggcggcttgttgttcgcgttcaatccggtctgctttttgtgttaagaattgttcgtagttcccggtatacgtatagagttgaccggcgtccaattcaaaaatttgattcgcaacccgatccaagaaataccgatcatgcgtcacgattaaaagtgcgcccttgtattgtgctaagcgtttttctaaccattcgatagaatcaaaatcaagatggttagtcggttcgtctaagattaataaatctgggctttcaatcaaggcttgtgccaaaccaacccgtttttgttggccccctgagagcgtattaatcggttgatctaagtcagttaaatgcaattgcgtcaagattgttttgatatcggtatccacagtccaagcatcttgttgcgtcatctgcgcatcagcttgttcatattgcgtttgcaacttaggattcgttggatcagccgtataggccgccaagacacgttcgtaattctgaatcgttttaaacaccggattttggccggcaaaaatagcggccatgatactcaaattagtatcaaagaccggtttttgtgctaaataactcattgcatattgattaggcgtttcaatctggccactatcataagagtcagtgcctgttaacgcgtttaataacgtcgtcttcccagtcccgttaatcccaacaaggccaattcgatcaccttcgcgaattaaaaatgaaatatctttaaagagcgttttttcgccataagtcttcgttaagttcgtcgctgttaatgtttgcaatatttttcaccttttactttcattctctcaatcatagcgaataatccggcgggtgacaattaaaaatcactaaaaaaaccgattcataatcgaatcggttttaatgcagtcattaaattttaggatattcgtcggcaattgagcttgtagcatcaatgacgatgtataaatgaccatttttttgtgagatttggctggtttgataaatgttatctaaaccgcttgtatccttattcttgaatgggaagtagatttgaagtggtttcttatcttgttcgtcttcaaagatgaggtctaacttctcgatatcttgatacttcgttgcgcgaccaaacatccccatttcaagtgagccagtattaatgtcttcactcttaacatgatcagcttctggtaagatttcagctttaaaactcttacatggatgaatttcttgcattgggccaccgttaattcggccatagctggttgttacccggctaatccaaatatcgttcaattccttgtggttgattgtccatgcgtcaccatttctaaaatacaatttcaattctttaaaaacgtgttgtgccatcaatgtcaccctttctgaatgtgcttacatgcttattttaacacaagtcttgaaaaagtggttcatttttatttagcggcctttagtaacgcttccgtcgtatttagtaactcgtctaggaccactttccgttctaaaatagctagtgttttgcctaaaatcggccctggttggaagccattttgcatcaatatttgaccattaatcgctaaatcggctttttgcttaatttgtaaccgatcatagcgttctaaccagtcagcagttggaattgtcgcagtcgtcaccaattgtgcgatttgcagactaatcactaagactgcttgaccagcttgataaaggtcccattggtcggcagttgccgtcaatagtttagggagtaagactaagccggctttaaccgcatcaatcacatcattagcactcttccaatgcttcaaaaagcgaccagcttgtgcaggggtttgcccgagtaaataggtcaccactaaccaaaccgcactttcatcatgcaactgttccgttggcaaggccgttaatcgttccaaagccagtaattgatctgccaaatctggacaataccgatataagcccgtgtcaataaacgtccgtaacccattttgccgttcaatcccttgcatcaacttcataaattcaacgtgaatgcgttcaatcgcaattttttcaagcaaggcagcgtgcttttcaatagcggcttgcgtggtttcagtcactgaaaaaccgagttggctctcaaaccgaactgcgcgcatcatccgaagtgcatcttcatggaaacgttcatcggcgacaccgaccgcacgaattttatgcgccttcaaatcagcaatgccgtcgaaaagatcgatgatttcaccatctgcgcgcatcgctaaggcgttaatggtaaagtcacgccgcttcaaatcctcttccaacgagcggacaaacgttactgaatcaggccgccggaaatcttgatacccggtttccgttctaaaagttgtcacttcgtagccattaccatggtctaagatcatgactgtgccatgttgaatcccggtatcgacggtccgcttaaaaatttgtttgatttcagctggataggcagatgtcgcaatatcaacatcatgaattggtaagcccaataaattatcacggacactccccccaacaaagtaagcctcaaaaccagctgcttcaatttgttctaggattggcagtgcttctgcaaattcgggcgcaaaagtcgttaatttcatttattcaacctcttatctaatcactattggtacatcattttatccatttatcataccacaatcctttgctaaacttaattggcttagtcatgacagcgattccgtgctatatttaatagtaggtaccacagtaagggggaatgacaaatgacacaaaaaacaaatttgaccaccactcttcgtgatttaatcgcgattgccattggttgtgcgatttacgcctttggtttgattacgattaacattcaaaatcatttagctgaaggcgggttaaccgggattaccttaattgtgcgctattggcttcatattgatccagcctatacgactttaattttaaatatcccattagtaattcttgggtacaaatttttaggtaaacgcgccttagcctatacaatttacggtaccgtcatgatgtccgtcttcttatggatttggcaacgagttcctgtcaccattaacttaaaccatgatatttttatcgccgcgctacttgctggtttgtgtggtggctttggtagtggtatcatctaccgctatggtggtacgacaggtggtagtgatgtgattgctaggattattgaaaaacggcgtggtattcaaatgggacgctccctattaatttttgatatttttgttttaacagcttctctcagttacctcgatatcgaacacatgatgtataccctaatcgcatcgtacgtgttctcccgcgtcgttaactttacactcgaagggacctatgctgccaaaggcttgttagtcgtcagtgatcactatcaaaagattgccgatcaaatcatgactcaaaccggtcggggcgtgactttcttacacgctgaaggtggttattcacaccaatcgcgtcaaatgatttattgtgtcgtcagtgctagcgaagtggcccacctcaaaagaattattgaacaccaagaccctaaagccttcatttcaattattgacgtccatgaagcactaggagaaggctttacgtatgagacaccaacgaaagattaaatagcatagacgaaaaaaggctgagcagataactgctcggccttttctgatttcttttttaaacaattgtcacgctttgttcttaataaccccaatttccttacttcgtaatatttaaatccaccgcttgatagaatgcgtttgctgtatccgaaatattccaaacacccagcagcacattatagccacttctgtcggttggaatattaatcgtctgtgcaacatctttggctggtaactttccttgatcatcaatcgaagtaatcttttcaaagtttaaaatacttagcggttgatttagattccaacctgggcgggttaagtaataatcccacgtacttgttttatgttgtgccgttaagtgccacttaatcgttaatgcgcctgatttaacttgattttaataccatctcgtactcgtttattcatcaagattcgaaaatgaactgatattagcactcgctaattttccatcgataaatgtattcttaggggcttcaatactttgtggctcgtattgaacttgaccaacattggtattcaatggtttttgaccggtatcatttgtgaacgcattactacctaaatacgctcgactacctggggatgtgatatacccgtgtgcgctaacttgtccggcacctaatgctgtcacacctaatactgaacaaaagccaacgatggtccatttcaataattgcttcttcatcatatccactccttatcatttatattacattttcatgttatcaagcccaggaaagcgttgccaaaatattgcgcttcattctttctgcctttttaaaatctgaaccgtttggacatcaaaaaagacccttcagttagataacactagtcggcaaaaaagcgcgcttttctaacgggtttggcaatcggttctaataaaaagacaatcgtcatcgcagcgacaaacattaagattgctacgccataaaacggaaaacgccaagaaaaactccccagcgccccaccgactaacggaccaactgccattccgattcccattgaaccttcgtataacataatggcttgttccgttttttcaggcatcacactgacaattgccgttaacgctgtcgataagaacaatgcgtttccaaagccccaaccggcccgcaacgaaattaattgtgagattgtctgtgaacgacctgctaaagcggcaaataatacaataatgattaaaccgatactaattgttcttttggcaccaattctagtcgaaatgaaaccagtaaataacataataatccctgtcaccaacatataactcgtaaataatagcgtcgtttgcgctggtgttgcattcagtttaaccgcgatggtttttaaaatcggatcaactaagccaatccccataaaagcgaccatacacgtaaaagccaaggcatacgctgatcgcagccctttattttgattctccattaacatatcactctctttctctttatataaagtacactagattttaaaacgtgtcaattttgacactaatttttgacatgaattaatgacatgtttgtgaaagaaaagtatgttatactgggcaataattaattgattaaagggtgaaacaagatgagtacactcagctatattttattatgtatgttagttcgtaaaccttgcagtggttatgagctaaagcagtatattaatttattttgggaagcacaccatagccaaatttatacagctttgaataaacttcatgaacaaggctacgtatcagtcgaaaccgatgccattcacaagcaaaaaaaaatttatcacttaacacctgaagggcaactcgtagttgctgactggttccaagaagaaacaaacgtccctactcaacgtgacgaatttttagctaaagtgtatgtcattgctttattcaaccaagaacaggccacctctttacttcaagatcgtcgtcaccattaccaaaaagcacaaaaacaataccaacataagatgcaagaatacgacgccattacagattcaatcgaaaaacagaagaatttgggccgctacctcatcttgaaacgccgcttaatggtttgtgccaccgaattagaatggtgcgattgggcacaggatatccttactctcaatcaaaacaaataaaagacagctgttgcaaaaagcaacagctgtctttttattctttggttagccaattcccatgataaacgcggaatacgttcacaatcgttagtaaacaaaacatgctacttgccatcaagaacggtccagccagcaaagctgacattgaaatgggcgcttggtgcaaaatggttcgcccgacatgaatcgtcaagccccaaactaagccccctgcaagtaggctcgctacaagactaacccctactaagattacgacgttcaattgttgtgtcagcaataactgttgttgcgttaaaccaagcaactgtaattggcgcatctgttggtcattatcctcctttgcgactaacatcgtcgccaacacatttgctaaaacaatcaacaaaggggcgcctaaatataaaccgattgtcaaaatgaaattcactaatcgctcattgttggcacttgtggtatttgtataggctggtatattccacataattgccgacatccctgttattaaaaccgcaatgattgtcactggcgtatacaacggtaaatattttttaacagcatagtcaatatcgtgagctgccaagtttaaaaagagcgttctagcacctagccaatagagacctcggctagctagttttaatactgtttgcccggtaagcgtaattagaatcagtagtaagaacaacacaagattcagattaccaacagaattaccgagaccgacaatcactttttcagactgcccaacgtaggttaacgtcataatttgcatcgccagtttaatgattaatccaatgacgaccattaacaaaacaatcatcttaattctacaaacgatccgccgccggtgactgggatgcttatttccatcctttagttgatggcgtgcatgccaaaaaccaccactaccagcaattagactagccaggataaccgttaacaaaagtgccatgaacgaaaaatgaatcgacatattcggcaacatttggggcccaacaatctgctgcaaccaaacataacaaaaacgcgttagcggcagagcaatgactccgccaagtagagcacttaccccactaacaattccgatttgaatccccaaaatagcggctaatgcattgaccgtcgcacctagaatcgcaagcattcggtagtccgctttaaactgatccaaaagctggttcacgattcctttaatcacgattaacattgtgatgccaccaaaaactatgggcatgataaaaatagggagcggtgtattctgaccgtatagatcaacttgctgcgactccgccacattcacaattcccgttaaacaaaaaccgaggattaaaccaaccgttacaaaaaccggtattgttgctagccattgacgccaggaatgctttaactgtaaccaactggtcgtccacatctcttacaccaccttatccaaggctgcatagattgcatagattgcctcaagtgacggttcaggcacaatttgttgaacctgaccgtcttttaacacaatcgcacgatctgtctgactggccaactcaatatcgtgggtcaccataatcaccgttttacctttggcaaccatctctttgaaatatgtaaaaataatcgatttggataccgaatctagcgcacccgttggttcatcagcaaacagcacatcacaatcagttagaatcgtgcgggcaatcgcgactttttgttgttcaccacctgataaggtctcaactgcaccatcgatttgacctgcaaagttcaattttgtcagtaattgttcaatctcagaacgtttcggttgctgatgactcagtcgttgctgtataacgatattttcaaacacaggaagtgactgaattaaattatattgttgaaagatgaagccaattatctgtctacgaaaagccgctaattgattaggtttcaattgatacggattaacccccgcaattgtcacggtgccgcttgttggcctcgtaatcctagaaatactgtataatagcgtactcttaccggatccagagggtcccacaatgctcaccaattctcctttttggaccttaaacgaaatatttttcaatatggttgtcgttcggtcagactgcccaattggtaccacctgtgttaactgatcaactgaaagtactgtatttatcattataaaatcctccccaaatgaattcgaattccctattcctcttcaatgtaacacttttatagagagattaaacgcgactaaagacgtaaaaaacgcccgactaaagtaatagtcggacgctttcaatcattattgcattgtttgataatcatcatagagggtctgcatatcaaggtcatttggcactaattgcaagtattgtttcaaagccgctaataattctggcacttgtgccatttcttggaagaataagattaagtcgtgtaagaattctgggttatcctttaattccggataagcgagcaaataattttcacgtgcatcatcgaatgcttcaagcgcaaattgtgattgtgccaatgaccaataaagttcagccgttggtttatggttggcaattgcttcttgcacaaagaccacgttttctgcatggcggttttgacggcgataaacttgactcaaggcactgatttcacccatattatccgggttaatttccaaggccttgtttaacatttgttcggccacttggtcgtcacccaattgaagggctaaatcgctccccttttgatagaggacctcactatacatatcgtagccaatcccggtttgaacggtcgtgagcgcctcttgaagctcattttgagcctcttgggctgttgctaggtaaacgtaaagcgatgtgtattgtggatcagctaattggagcttcgtaagaatttcaattgccttttgataatccttgatttgtaggtataaaaagcccatttggaattgatcgtcttccgttaaaaattcgacggtcattatttcgtaaatttggagtgcttcttcaaaggccccactgctggcataacttgttgccaagcgtttttgaatattaacttgacccaattccagcacatcttggtcaatcaaagcttcgtagtagttagccgccttaccgtattcacccatttcaaagtacaattcggctagtgcaaactgcatcactggttcatcaggataaaggcgtagcgccgttaatagtttctgttcgctgacttctggcaagcccatcgtctggtacacgtcagcggccgttaataggctttctgcgtacgcattagattccggcgtaatatccgtcaataaattgagtgcgtcgtcgtattggccgttgctgaccgcaatatcggccaacgtcgtccgaatttgatcttcatctgggaattgcgctaataattgttgatagattgtcgacgcttgttccaaaaaacccattgcgtagagttcttcggccaaactgtacaacgtttctggatcgtcttcttttaaagccttttggaaaagctcatcggcttgttttaaatcattatcttctaatgctgatagcatttgttctgaattcgtcatttaaccaccctttttcgatttatctattctaccataaaatgacttttagccaatcaaaaagggctgggaaaatcccagccctctcatgaattcttatttaacagaatcctttaaagctttacctggcttgaatgcaggtactttgcttgcaggaatcttgatttctgcaccagtttgtgggttacggcccttacgagctgcacgttcacgtacttcgaatgtaccaaagccgattagttgaactttgtcaccttgtttcaaagtgtcttggattgaaccaaatactgcgtctactgcagcagttgcatctttcttagttaaaccagtctttgatgcaacgttttcgatcaattgtgctttgtttgccatgtttttcacctcctgctcatcacagataatcagtaataaataccgaaatcatttttgagtggtcaaaaatgacgaaacaatgagttgatcaccatttcatttttaaatttatcacacaaacctagtgatagcaaggattttcgctaaaaaaagggctttctttccaatttagttaatcatattagcttatcaacttcgaaatttgtttatttccgttgacgagggatcaaatgaattggtgtaccggtaaagtcaaacgttttgcgtagttgattcttcaagaaacgttggtatgagaaatgtaatagattaatgtcattaacgaagacgacaaatgtcggtggttgaaccgccacttgtgtcatgtaataaattctcaaacgtttcccgttaatcgctggcgttggtgtgaccgttgtggcttccatcaagacgtcatttaataaggctgattgaattcgtctgttttggttttcactgactaattcgatcattgctggtaagttttgaagacgaacacccgtcttagctgaaacaaagatgattggtgcgtagtctaagtattggaattgattccgaatatggtcttcgaattccttcatcgtatgattatctttttcaagcgtatcccacttattaacgacgatgataatcccacgaccggcttcatgtgcgtagccagcaactttcttatcttgttcccgaataccttcttcagcattcaagacgactaatacgacgtctgaacggtcaatcgcacgtaaagcacgcataacagcgtacttttcagtattttcgtagaccttaccacgtttacgaatcccggcagtatcaatcattgtaaattcttgattattttccgccatgaacttcgtatcgatagcatcacgagttgtcccttcaatttgagaaacaatcacacgatcttcttttaacatcgcattcactaatgatgatttaccaacattaggccgaccgattaaactaaatttaatactatcgtcgtcttcttcttcaagatccgttgggaatttagcaacagcggcatctaataaatccccgaccccttggccatgcgcaccagaaacgggaattggatcgccaaagcctaagctgtagaaatcaaagatatcttgacgttgttctggattatcggctttattaacccctaataggattggcttgtcagcgcgataaagaatttgtgcaacgcgttcatcagcatctgtcacaccttctctggcactcactaagaagataatcacgtctgcttcatcaattgcgatttctgcttgttgtttaatttgttccataaatggtgcatcactaatttcaatcccaccggtatcgattagactgaattcatgacctaaccattcacttgctgtataaatccggtcacgtgtaacacctggcgtatcttcaacgattgagatccgttcgcccgcgatccggttaaaaattgttgatttaccgacgttcggccggccaacaattgcgataactggttttgacattgtattcattcccttcattgttcagtttaccttgtccatcaattgacgacaagcacgttattgcgaaaaaagtccgcaaaataacacaaggacaaaaagtgctttaagcaaagcgaccccttgtcccgcgattagtctatttagcgactatcaggaaagggtctgggacaaaaacctagtttcgtcccagaccctaccttaagcctattaagcattcaatacgattttacaaactatttttcgtctaatgctttaccaagcatatcaccgatactaaagccagtttcttcttctggcatttcgtaatctgatggtgcaacgtcttcttgttcagaatccttagcaactgctggtttttcttgtaaagctttgattgataaacctaaacgttgttgttcaggatcaactgacaagactttcacttgaacagtttgtccttcttctaaaacatcgtttggtgttgcaatatgttgatgtgagatttgtgaaatgtgcacaagaccttcaacaccagggaagacttcaacaaacgcaccaaaagtagttaaacgtttaacagtcccttccaatgtactgccgacaggtgctttttcagcgatgtcatcccaaggaccaggttgtgtatctttaattgataatgaaatccggcctttttcttggtctaagctaagaatcttaactttcacgttttgaccaacttctaatacatcagaaggttggttaatgtgatcgtatgagatttctgaaacgtgaactaaaccatcaacgccgcctaagtcaacaaaggcaccgaagttagttaaacgtgcaacttcgccttcaacaatatcaccaggcaatagtttttcaaaaacggctttaagttgtgcttgacgttcttgttctactaatgctttacgtgataagattaagcggttttcgcttggttcaatttcaatgatttgtaattctaattcttgacccttaaagctattaagatcacgaacgaaacgatctgaaagcatagaagcaggtacaaagccacgtacgccagcatcaacaactaagccacctttgacaacgtttaaaactgttgctttaattgtttctttattttcaaatttttgttcgatttctgcccaaactttacgggcttctaaacggcgcttagataataagtagctaccattttccttgtcgttaccgattgtcgcaataacaactaaatcaaattgatcaccaactttgacagcgtccgttaatgtttcaattggttgacttgataattccttttgaggaacaacgccttcaacgccagttccttcaataccaacaatgacttgtcggtcttcaattactaaaacttcacccttaacaacgtccccaattttgacttcatggacactatctaaagcagctgccattgtttcactgctttgggtgtcattcaaattagcatcattcatagctaaaatcctccttaacgactatctatacatcctttattttagttgatatggcaatggattaccagtttttttatctgattaacccataaaattacatattttgtttcgcaatcgttaaaatttcagcaacaacttcatcaattaagagctttgtcgtgtcaatttcgattgcatcgtcagcttttctaagcggtgaaactgcccgtgtactgtctttttgatcacgtaattcgatttctgcttgtaacgttgctaatggggtcataatccctttagctgtattttcagcataacgccgtttagcacgttctttcgcactagccaccataaaaatcttaacttttgcatctggtaaaacagtcgtgccaatatcgcgaccatccatgacaacttgtccttgttcagcaatttggcgttgacgatcaaccatttctgttcgaactgctggtaatgctgaaacttgtgagacattattcgtaatttctggtgtccgaatcgctaaagtaatgtctaaaccatttaagaagactttttgaccagcttcatctggttggaactgaatatcagctttagttaattcagccatcaaaccggcttcatcaccataatcgaggcctagttgttgtgccaagacggttgctgaacggtacattgcacccgtatcaacataaacgaaccctaatttagtggcaacaatcttcgccacggtactcttaccagacgatgctggtccatcaattgcaatttgcatgtaaatcctcctaaaaaaatcattaaaaaaggctgggagaatccccaggccttctgtctagcattattatttaaccttgagtgcggttcctggtgcaacacttgaattagctgttaatcctggattcaatgctaataattcactcaatgacatgccgttgttggcagcagcacggtaaaggccttcaccttgtttaagggtataagtaccacccgctgtttcagatgaagatgagctacttgacgcttcagcttgacttgaactagcagcagattctgaagcagcttgttgactagcactatcagcggcagcttgttgttcactagctgcttgttcactagctgcttgttcactagctgcttgtgctttagcactttcgctagcagacttagcactagctgcctcactatcagccttcgccttactttcactggctgctttactttcagctgcttcttggctttcactggcttctttagcctttttagcagttgatttactcttactcttctcgctatcagcggttttgacgacaatcttagaatcttctaaaccggggcggttcgcacgactagaatgaacggtgtaagcgataattggaaatgcgatcattaaaactaataatacagctagaataatagcaaaatatgtatttcctttttccttactcttggcagcaacgcgggataaatttcctttgtcatcccgatcatcgtcgaactggctttcccagggtttttcttccgtcggattatcttgttttttcttatcatctttgagcattgacggccctccctattggtattctttgatattgtaccacagacttttctaaaaaactttaaatttatctaaaataattggtccaagattcccgtccaaccagtcagaacaacggtttcagcggttttataattaatagcctgttctaagtctaattgtgctaaaaagtcggtcgaatcctgttccccgcaacacgtttcgctgtgttcaatcgtctttggtgcctggtcaaaatagttcacaataaattgacgccggcagcccttgagcgtcaaataatccaacattgtttgtaatgaaaattgtttttcagtttggcgattatccaataaggcagtcacctcttcttcggtcatccccagttgttggtaacgacgcaacagttcaaattcactgccttgactttgtttaaataattgcggttcctgataatagcgccgaatgagtccgggttccggaatcccaaatgatacgagtgattgttgtaaatataaatcttgcggggttgttaggactaaagcatacgctgcttgcccatctcgacctgctcgtccaatttcttgtagataactttcgatattttgtggcaagtgataatgaatcacaaagcgaatatccgctttgttaatccccatcccaaaagcattggtggtacaaattaaatcgagttgtccttgcataaattgttgttgaattaaataccgctcctgggttgataacgctgcgtggtaataagcaatttttagatcagtctcctgttgtaaaaaggttgcaatcgccattgtcttttgccgacttgaaaaataaacaatcccgggaccctggctttttttcactaagttggctaaaaattggttcttcgcttgttcatcaggttgttggctcacgcccaaatagatattggggcgatcaacagaggtcatgatttgggccgcgttttttaacgccaacttattcaaaatatcttggcgtacacgatcattggcagtcgccgtcaaagccagtgttgcagttggctgtaattgggccttaatggctgctaaaactaaatagtccggtctaaagtcaattccccactgtgaaatacaatgggcctcatcaaccacaaacaaatcgatttgacaacgttgaagcgcctgaatcacttctggttgactgatagtctccggtgccataaaaataaagcggtaatccgctaaatgcgtcagtaactggtatttttgctgaggcactaaattagaattaatggcgacagctcgtttttccccttgataattcaattgggcgacctgatcttgcattaatgcgattagtggcgagacaatcacagtcgtatgccccaagatataggccggtaattgataacacagcgatttcccggtcccagttggtaaaacggctaatgtctcctgcccagcaagtaccgacttaataaccgctaactggcccggtttaaaggttgaatagccaaagtgctgcgctaactggtcataaatgagttgttcagaagtcatgcggccaccaccttcgttttaatttgatataaccgataactgaaaaaatccagtgtcggtaattgctcgtgagcaacgttaaacgttaaatccggcatctcagtcatcaaagccgccaaagcggtctctaaatctgaactaataaaccgctcaaacgggaactgcggctgcaggattgccgtttctaaaatgtgttccctaatcgtgcctaacttaacccggcgtttttggctaatcatttcaatggactgtccttgttgcagcagtgtccaggtttgtgccgtgcttaaactcaaggttgaatccagtggtgacaataaacacgctaataacggatagtcggttgtgtgctggctgaggatggcaaaaaaatgggcttgcgcatctaacagccgaatcgttacggtcagtggttctaaggttagtttttgcgccaattgctgttgactctgcccaattatttgatggccaactaggcgattcgctaataaatcagcctgaacaggtgttaactgcgttaagatctgttgtaattcttgtttaaactgagtgaccatctctgaatcttgtttatgctgtttaaaccaactgacaacttgcacacgatcacgcatgctagtttcaattggaaaatagtgtgtgttatggtgactatattccgacataatttgaatcgccaaaaacaagcggctttgaaactgctgtaaatgacccatttctgggccataataatgcgttggccactccaaagtcgtcatcaatgtagccttttgagccgcaccagtcggtgtcaaccaagcttgccgatcttcaaccattaaccaacctttttcttgtagttgtgttaattcagcttgaaattgggctaattctagattaggataaatctgaagccactttaataaaccatacgctaaaccagcatacaggttggatgtggtacgcttaccgaccaatgtataataaatggcttggtagcggcggggtgccgtcgcaaataaacagagtaaatagtctgttaacatcttaataattcctctaatctagaaagtgtgaaaataatgctctatagtaaagttatcccagaacgctgtattgcgtgcgggttatgccagttaaaggcgcctgaactcttcgactacgatcacgaaggggttgctttttttaaaccggacaataatgccggccaaactcccatcgaaaatccgcatgatctaatcgcttttaaagccgcttataccgcttgtccgacccgcgcaatcgtccgtcaagaggagccattttcatcgtagcatattcagacaaataatacacgttttgtcgctaaactaataaaagcctaccgctattttgcggtaggcttttatatttagattgctgttttcatatgttgttttaaccatggtagaattctgagatataaaactgcaaagacgactgtgaccaacgcacccttaatcaaattaaaaggtactagtccgataaagacgtatttagtcatcgacattcccaaattaaagttcaatagtttaatatacatcggtaagatgaataaccagttggctaagcacatcacgattgtcatactgatcgaactgactgttccggcaatcacttgcccccacagcacactcttttggcggttaaagagataataaaatggcaatagataaaaaatagatgccatcacaccggcaaaatcgccaactaaactaggtaagctagcaccagtcatgatgaaatggagtaacgaacgaattaccgcgactccgattccgccgattggtccgtagataaaggttcccaacaagacaatcacatcactgaaatctatcttcagaaatggaaaagccaaaataatgggaaactcgaaaaacatgacaataaatgagattgcccctaacatggcgaccccgaccattgtccgtacttttgaaacacgcattgcaaacaccctccgtatgaggttgccttcgtcagcggacccgctgagtcgattgtacctaaaaaggcctgctaatcagggtgattaacagaccttagttgaatacgttcatactcaaataagccctatcttcttccatctagactttcactatcggtactgggatcacaccagttcagccaccacaagaatcaacattgcagcaggtcgcggacttttaccgccggtcgggaattacaccctgcccctgaagacgaaccataatattttattacgcaataagcatagcaaaccaatgtgcgaaaagcaactaattagtcatgtcgtgacaattttggtctgtttttatgctttggtttttcatttaattcagcgatctttttgaattctgcaacttcgattggtttcaaagcacggtattcgccagaaactaaaccatctaacgttaagaagccgtatgtttcccgttttaacttagaaacgggtaagccaacagcagctaacatattcttaacttgatgattcatcccttcatgaatcgtaatacttaaaatagccgtattcttgcgacgatccgttgaaatgattttcactttagcaggggccgtcttacgtttttcaagcataatccccttccgtaattgacggagcatttctgcagttggtaaacctgatactttcgcaacataggtcttatcaaccttgtattttggatgcatcatcatgttggcgaagtcaccgtcattggttaatagtaataaacctgatgtatcgtaatcaagacgtccaattgggtaaacgcgttcttgaatatcttcaaggtattctgtgaccacgcggcgctttttatcatccgtgacagctgaaatcacttggcgcggtttataaagggcataataaacctttttttcacgcgttaatggcacaccatccacttcgatatgcgcagaagtactatcaaccttaatccccatttccttaaccactttaccgtttaaagtaacgtgaccagtcgcaattagcgtttcagccttccgtcgtgaggcaacccccgcatttgcgatgactttttgtagtcgttccatagttattgttctcctttaggggccgtctctggtcccgtttcatttaatgtctgttcaaactgacgatagtataaatccgcagaatcattatccgattctgccgtatcgtccgttaatgtcatttgttctagttctggtaattcttttaacgagcctaagccaaagtaatctaagaaataatcgctcgtcccatataaaatcggccgaccaggtgcatctttacgccctttttcaacgattaattgtctggcaagtagcgtttgaattgccccactactttgcacaccgcgcacttcatcaatttcaattcgagtgagtggttgccgataaacgatgatcgccaatacttcaagtgctgcttggctaatactcgtcgaaacgggaccatcaaaataggccttcaataaacccgcgtaggccttcttagtcactaatttataacaatcagccgcttgaatcaggttaagaccagattgttcatcttcctgataacgttttgctaatttcgttagtaactgtcgtactgcagcctcgtctaacataatgagtcgcgcgatatgttgcaacgtaatgccttcatcgccggcaacatagagtaaactttcaatttcagcgagatggttcatctgcaataccttctttcaatgtcactaatatctgttcatcataacctgcttggtcacaattaatcagccgttctttcatcaattctaagacggccaaaaaggtcgttacgatttcttcacgatcaaaacggttgataaccaactgttcaaaagtcgttgttgctcgtgtttttaagcaatcgataatccaatccatcttttcagcaatcgtaatttcatcattttgaaccgtcttaaaatcggtctgttgaacagttgcttcaaccaacattttagacacagcagcagctagatcacgcggcttaattacaccacgcgccagtgggaccactttttcagcaggattagcacttgccggtttcgcaaataataattgtctttctgattctcgttcttgtaagaccgtcgcaattttttgaaaagcttggtatgccaataattggtccaccaattcctgacgaggatcaacatagtcttcctctaaggtttcagccattgccggtggtgctggtaagagcaacttactcttgattttcatcaaggtcgccgccattactaaataatcacccgcaatatctaacttcaattcttgcatctggtgcaagtagtctagatattgcgtggtgatttcagcaattggaatatcataaatatcaattttagtctgattaatcaaatgtaataatagatctaatggtccttcaaaatccgtcaaaattaacgttaattgttcagtcatgcgttacattaatccatttctttagtctgctgttgctcccatttagcaattaaaggcgctgtatccaatgatcccatgacacggttatcaggataaagtgctgccagttcattcaagatccggaatagattagtatcagttctttcagcgggacttagtgacatatgacgcaccaaaataaaatcagtgccaatctcgacccctacgacgccggcgaagtcgccctcatcattttgccaaaggtataagacgtgttgatcgtcttgattgtaaaaagcaagttctgactgtacatgacttacttcttttaaatctggaataaacgataaaaagcccatcgcaattttttcataatcattcttgtacttaaataacatgttgacctccaatgatcaaacaaagttctgttagcaatactctaccataaattagaaaacacgacaaatcaacctaatcacgcggatgacttctctgataaacttccgtgagatgtttcttactgatatgcgtataaatttgggtggttgaaatatcagaatggcccaataactcctgcacaattcgcaagtcagcaccattttcaagcaaaacagtcgcaaaagaatgccgcaatgtatgtggtgtcacatctttatcaattcctgcggcctggacaatggcttttaaattcttccaaatgccttgtcttgttaacccgtttccgtgaaaattgacgaacaaataaggtgaatccttgcccttggttaaccgattgcggctacgttctagatattgattaatccagtccaccgcaacatcgccgatcggaataatccgctccttatctcccttacctagggtctgaattaaccccagagataaatgcaaatccgtcaatttcagatgaaccagttcactaacccgcaaaccagtcgcatacaagacttcaaggattgcccggtcacgaaggcctaatggtgtactcgtgtccggtgtctttaacaaacgttcaatctcttctgatgataaaacagccggcagatgccggccttgcttcggggaatcaatctgcagcatcgggtctttttgaatacgtccctcacgcgctaaatattgatagaatttacgcaatgtcgaaatactacgcgtgatactgctttgcgccttttgggccgtcgtttgggcctgtaagaaacccaaaacaataaatcggtcttccgtaaaagacgtcaatttttgtgacactaaaaactgctgatactgtttcaaatcttgccggtaactctgacgcgtattttcagaaaggccgcgttcaatcttcagataatgtaaataatcttgaattagatcatccaaacaaacccctcctacaattggctaatatccacttgcttacttggatctagctgattggccggtaacccattagccgaattggcagcttgacagttggcacaaatcccctgaagggttaagcggtgatctaagacagcaaatgagaaccgctcagcaaccgtctgttcgacgcttaccaataagtcttcatgaatttcttcgatggccccacattgtaagcataacaaatgatggtggaaatgctgactggcattttcttcgcataaatcataatgcgtcacgccatcttccacaaagctaatcttattcagaacgtgtaactcagttaacatctctagtgttcggtaaaccgtcgctaagccaatctctggcacttcggctttagtcttgataaagatttgctcggcacttaaatgcgcctgtgagcattctaaaatgaccgcaacggttgcttctcgttgggcagtcaatttataacccgcttcttgcaattgttttctgatttgttctaactgctcagccttactcatcaatagagacttcctttttttaataaatcacggcattactgtcattaatttaaattaatcttggtcttgatcgttatcaacaattggttcgatatctttttggcccttagccgttaaaattgtttcgccttcttcttgcacgatgaaaccattcttcattaaccggcctaaagcacgcttgaaactgcccttactaatcccaaaataactcttaattaattctggattactacggtcagtatatggcattgcgtagcctggttgccgttttaagacggccataatcatttcggcatcatcaccgatttcttcataggctctaggttttaaactaacatttaaactaccttctggacgcacaccgatgacccggcctttaacccgttggccaagacgtggttctgcttcacgttctgaggggtgaataaagccaatgtagaaatcatctgttaataagaaagtccctgccatcttcaaacgataaacggtcccttcaatatcttggttcttcatttcttgtttagcacccttagaaatagctctaaagatattttcgtcggctaattggccccacatccgacctttttgatcaacttcgattgcaatcatcaagcgatcgccaaccttaggccataatttcatgatagttggtaacacatcaagcgaaaccacaatatccttatcaggtaagccgatattaacaaaaacaccgagatcacgacgtgtttcaacgacttcaccaaaagcaaagtgaccgacacgtgatttaggaataaccgttgataaaactaattcccggcttgaattttcatatgcaaaaccggtaactgttgccccgattgctaattcttcttctaaatggtctttctttaattcaaacgttacgccgtctttttgggcgaagtacgcttcttcattttcatctgttacaagtgctgtaatcacttgtccgattaattcgttcatagttaacctctttattcttcttaatggattggtactaaattgaaaattgttaaaatggtgtaggtgataccggcggcaatcactggtccagccgcgattcccttaaggaaaacgacgcccataattgtgccaaatacaagcgccactgtcatttcgggactagcggctaacaagccaacaccctttgcagacaaaacagcgactaacacgccacacccaacggcaataaaacctgccggtgtcttaaaagcactgattaattctttaaaaccgatttgaccagtcgcaattggtactaagatggccacagaaatgaccgtcacgccccaattaatccctttagcctggataaccggcaatactttttcagaaattggtaatgcctttaagactaaaacaactgcggtggcaatgattaaagattgattttttgctaataaggcaacgattaaaatcgctgctaaaaataaccaactttccatgtgaacctccaataaagtctccctatcattgtaccgataattaggcgacttgtcagtattttcataaaagtaatttcagaaaacaaaattttcaaatcaaaaagcgacttgcgcacaaaaaaacaccctcaaattttgagggtgttttctttcttaatcagcgtatgattaaagagcgtttgttgcaccgcggtaaacaataccacgacgtgaatcaacagtaacaacttcgccatctttgatagcttctgttgcgtctttagcaccaacaacaactgggatacccatagcgataccaacaacagcagcgtgtgatgttaaaccaccgttttcaacaacgatagcacttgatttttcgattgctggtaagtaatctttgtcagttgctttaacaactaagataccaccatcaacagctttttcagctgcttctttagcatttgaagcaacaacagccttgccaacgattgtttcatcgccaacaccttggccttgtgttaattttgaaccaattaattggatcttcataacgtttgttgtgccacgttcgccaacaggaacaccagcagtgatcaagattaggtcgccttctttagcaaaaccatgttcttgagctgtttgtgtagccaagttgaacatatcatctgtattagcaggtttcttagccataactgggtatacaccatagttaactgttaaaccacgacgtgtacgttcgtcaaatgtaacagccaagatatcagcttgtggacggtatttagaaatcatacgtgctgtagaacctgattctgtagcagcaacgattgtcttgatacctaagttacgtgcagtatgtgcaacagcttggccaattgattctgtcaagttagtcttgctgtatgctttcaatgcatatgcatcgcgatctgttaatgatttttctgttctttcatcaatgcgggccattgttgcaacagcttctactgggtagtcaccgttagcactttcacctgaaagcattgttgcgtcagtaccatcaataacagcgttagcaacgtcattaacttcagcacgtgtaggacgtgggttttcttgcattgagtccaacatttgtgtagctgtgataactggtttgccaatagcattacatttcttgatcaagttcttttgtacgaaaggaacgttttcaaatggaatttcaacacccatgtcaccacgagcaatcattaaaccgtctgaaactttcatgatatcgtcaatgttgtcgataccttcttgtgattcaatcttagggaagatttgaacatgttccatgtgtttttcttctaataattcacggatatctaaaacatcttgaggtttacgaacaaaacttgcagcgataaagttgatatcgttgtctaaaccaaaacggatgtcactagcatctttttctgtgataccaggtaagttgattgaaacaccaggtgcgttaacacctttacgtgagccaaccataccatcgttttgaacttcagtaacaagttctttgtttgcttcgtctttttcaataatcttaagatccactaaaccatcatcgattaaaacgtggccaccaacgtgagtatcgtcgtatagacctgggtaagtaacggcaattttttcaggtgttccttcaagagtatcgtccattgaaatacgtaccacttcaccagtgtgtaattcaaatttcttaccttgttgaacagttgtccggatttcagcacctttagtatctaacatgataccaacagttttgcccgtagctttttcagcttcgcgaaccatattcatacggcttaaatgttcttcatgatcaccatgagagaagttaaagcggaatacgttagcacctgcttcaattaattttgtgatgatttcaacactgttacttgcgggtccaagtgtacttacgattttggttttcttcataagtggaatctctccttttatgtctgtttttttaaaagactttacagtcattttaacgaattttgggtagaactataaaatactagtaagctaaatcttcatttaaatcataaagatctaacattgcgtgatgcttgtgattgaataagtctaacatatcatgtgcgataatttcattcttttcaatcccaagtgcaaccccgcctttgccttcaagcaataattcaactgcttttgagcctaagcggctagctaatacacgatcactagctgttggtgaaccaccacgaacaacgtgtcccaaaacagttgaacgtaagtggaaatcgccgtattcagaaagtttttctgagaattcatcggcatgcataacgccttcagccaaaacaataatagcatgtttttggccatgttcgcgtgaagcacgtagcttttcagcaacggccttaacgtcgaaatcacgttctggaataataatgtcttgtgcgccaccggctacaccagcccataaagcgatgtcgccagcgccacggcccattacttccacaacgaaagttctttcatgacttgcagccgtatcgcggatacggtcaattgattcaagaactgtgttaacagctgtatcaaagccaattgtttgatctgtaaatggaatatcgttatcaattgttcctggaagaccaattgcgttataaccatgttcagtcaaacgaagagcaccgtgataagaaccgtcaccaccgataacaactaaagcttcgataccgaacttgttgagttgttcaatacccttcaattgtccttcgacttgtgcaaattctggataacgtgctgagtataagaatgtaccaccacgttgaatcttgtctccaaccgtaattggatccatcttgaagatatcaccagcaactaagccagcgtaaccataattgataccatagacttcaaggccttcatgcattgcttttcttgcaacggcacggacggcagcgttcataccaggtgcatccccaccacttgtcaaaatacctatgcgtttcatcttttcaccccaggcaaatattttacttaaaaaaccgatttggtctttcaaagtcactaatatattatcacttttctgaaaagaagtcttgtcttttcagaagtttttaacaaacttattttcaaaactaaactaactaaagccctttaaaataacgtttgtaggccccagtaaggttgtaagcgccgtcgttaatttttcatcgttcgcaatccaatagcgttcgttcaaaagaattgacttcttcgttgctgaattatagagaattaccgggattggccctcgacttttttcgagtagttggtacattttttgttgctgttcacgcgttaaatccgcagatagtcgtaaataaagcgtggccttaggcaaccctttttgcgcttgttccgctaacataatctgattaccgataagttgcaactcttggcgttgttccgtctttcctatgactaaaatcacttgttctttggtcagccaatctgctacttgccgataaaccgatgcaaacagcgtaacactaatctcgccggtggcatcttgtcccgtcacaaaagccatttgctcgccttttttcgttcgaatcaccttaattcggcggacaaataagactagtcggacattttgattgggtgctaagtcactaacttccggcacgtgatagtaccgacggacacgttcatacttttctaccggatgccctgaaagataagcccccaggtactccgcttctttgtccaagcgctccgttaacgtcaaattagacaccgttttttctttgggtgctagaatttcgaataacgacatattatcgccagctaacttaacactatccaataaatcatcgagattcatcaaaagtgcgttgcgattgggattaaattgatcaaaggccccactgtaaatcaacgccactagcgcctcttttttgagatacttcgcgtctagtcgttgtagaaactgtaacacagatttgaacggaccacccgtttggcgctcatccaaaattgccgctacaaaatcccgtcgtaaacccttgatactgtataacccaaaaataatcccggcatctgtcaccttaaaataacgctgactgagattaatatcgggtggtaagactgataattgtcgcttctttgcttccgctaaatacgttttagtttttgttccttgatttaagacggcatttaaaaccgctgcgaaaaaggcttctggttgatgaacttttaaataagccaaccaaaaggcaattttactgtaagcgaccgcgtgcgaccggttaaaaccatagttggcaaactgttcgatatagtcgtagaccgttgtagcggcttgctcggtatgacctaaagccagcgcgccttcgataaacttggttcgactcgcatcaatcactgattttttcttcttactcattgcccgccgtaagatatcggcttcccctaaggtaaaaccgcccatcttagaagccgcctgcatgacttgttcttgatacaccaagataccataagttggttgcaaaatctcagccaacgaatcatccggataggtcaccggcactttgccacttttacgatcgatgaaggtatcaatattttccattggccccggtcgatacaacgcatcggttgcgacaatatcttcaaaagaagtcggcttcaagcgccgtaaaacatttttaatccctgttgattcgaactgaaagatgccgtttgtatcgccttgttgaaataacgctagcgttgctgggtcatctaacggaatattttgcggattaaaaggctgacctgtttgttggctgactaatttaacaatattcgctaaaatccctaagtttcttagacccaggaagtcaatcttcaacaatcctagttcttcaacattgcccattggtagttgggttaactcaatttcatcgccaccgctttgcagcgcaacggtttccgttaatggcgcttggctcaacacaattcccgccgcatgggttgaataatggcgtggtaagccctcaattcgctgcgccgtttcaaatagtaagcgattttgttgagaatctgctacgaggttcttaaaagcttgcgactgatcgtaagcttcttggagcgtaatttttaaaacgtttggaatcgccttagaccaagcactcatttcaaactgactgaggccaaagacccgaccgacgtcctttaacgccatcttagcggccaaggtcccaaacgtaatgatttgggccatgtgattttgcccatatttttgataaacataatctaacacttcatcccgacggttatccgggatatccaaatcaatatccggcatattggcccggttaggatttaagaaccgttcaaacagtaattgataccgaatcggatcaacatctgtaatccgtagcgcatatgccactagcgcaccggcagccgacccacgccctggacctgtcataatattttgttggtgggcgtattgcatcacatcggcgacaatgagaaaataatcggcaaaacccatctcgttgatgacctgtaactcgtagtctaatcgtgtctggtaagtttctggaataggctgtgtcttaaaacgcgcttgcaagcccgcttgactctgttgctttaaataagtggcggctgattgccccgctggtgtctcaaattgggggagctgggcccgtttgaacgataaatccacctgacattgagccgcaattttttgcgtattagcgacggcttctgccagttgtaacgcttcaaaggcggccgttgcctgctgcacatcttctaaaaagtagccacctggcgcttgcggtgtttggagattaacctgcgtacccgctttaatatgttgcaggacttgaaccgcaaatgcatcttccggttctaaataccgcacgtcccctaaagcaactagcggtactgccgtttgctggcttaattgtcccagaggcactcgctgtcggctagcggcttgtttagcactaatccctagataaagactatctgcatcgacaaccgcctttaatcgctcaatataggtctgtgctgccgttgcatcgttttgcattaacaagcgtactaactcgccatcttgactcggcgtgataaccaccaactgctgtaatagtgattgaaccgcctcaaatgggactaattctgattgcgtcataattttcgttgaaatttttaaaatattttgataacccgttaaatttttggccagtaaaatcaacggaaaccgttcgtcagtctgtataagtccgccaacttcaattgtgatccccaatagcggcttaatatcggctgctttggcagccttataaaaatcaactaacccatagacaacgttcttatccgttaacgctaaactctgatagccacgcgctttggcggctgttactaaatccgtaattttagtggtactttctaagagcgtataggtactcttaacctggagttgcacaaatgccaagaacgccccttctttctgatgacagattctaataattccagtataacaaattatttcaaatgaatctcgttgtaaaacgtgttacaatatcatagaattgcatgaaagaaagaaggtcaatcatgaaatacgttatgacgcttttttggacgctaatcttcggattcgttgtcggcttcatcggttctaagttagttaaattggactttaatgttcaagcaacgttgactgtctcagtcatctttgggattttactcaacctagtaccccttgttttacctaaagacccagcagcataagacaaaaaggacgactcaacgaaaatgttgggtcgtccttttttttgctttattttgtaatgtagatgtataaatgacttgcagaaaagccggtattaaacttaacgccatttgaagtaatggtcttcattgtcgtttggttgctcttcttattcttcttcgtaaacttactaaattcagacatgaccttcttagaatccgcacctgttgattgagcgagtaacgcaaaactcgttccgaattccttcaaagccgctttatctttaagcgctttaattggtgcgattaaagtaagtcccatcacatcttgatcagcaattgcccctcggatcacaacgttatcagttttcaccaattgatgaacgccgtcagctggttttgctggtaataattgatcctttttagccgttttagcttgttgcatagctgcttgaacatctttttgcgtttgttggagtgccattaattgggctggtgccaattgaccggctttggctgctgccgcttgtttttgtaagctttgcgctttggcttggtctgcctttgataacgccatgccaataacagcttgattatacttgtcggcaatcgcttggtattgaccaacagcggtgcctgctgccaccgtaactttcttttcaatcgtctttgagcccgttttagcctttaacgtgaccgtttgttgtttggttgttgttggtacttgaacaacgtatgtgccttctctaacgcttgttttatgcgttgcgccttggtcaatttgatagcttaagtgcgcctttttattagtggtacctttgacaactgcgaccatcccattttgatggtaatttgttttagaagtcgttaactttgcttggccacagcccgctagtaaactaactaatcccaaactcacgactaatccaactactgtttttttcatttttcgtcaccttttcatagaaattatcgttaatgagcttttagcgtaacccttttagaacaacatttcaagtcaaaacgacgacgtgtcacaaatatttccgccatccaaaaaggccaccgcagatccggtgacctttattaatctttttattttaagcctgttttcttttcgtaacgattgaacataatcaatgcgacaactgtaaagaagactggaccggcaattgaccagaatgtttggccaaggttaccgtcgattgcaggttgaataattgtgaagacgttggcgaacccaactgtgaacattaccatccaaacacagaatttgtagaaggttttacccttataaatcgtgaatggcttttcgatactgttatccttcttaaaaccaaagaaggcaaaggcaacgaataagtatggtaatgtcattgaaacgtttgtcatggctgttaaaatttcgaagaacttagcagcgctcttaccaccaaaggcaacaaaagcgataattacaattacaatcgcagcttgcacgatcatcgcgttaactggcatgttatgtttgttcttcttagcgaatgacttaggccataattcagctggtgtgccttcgataatcgtcttaagaggtgagaaaatcaatgtaaagaatgcaccagtaagtgcaaggaacattgaaagacccatataacgacttaaccaaatcccaacttgaattgcagcgtgatgactcatatgaagcgcaagccctaattggtaacccatgttattcatcgcaatgtaagcaacgttccctaaagtaacttcggcatttgagccagttactttagcaaaaccgccgcctgttttgaagacgaaatcccagttagtaaatgtccccatcatgaagatcccgatggcataaccaattgcaatcacgattgctgaaattgctaaccctttagggaagttgactttagcattttctgtttcatcaactaacccaccaacaacttccaaaccaccatatgcgaagattgcaaatacaacgaaactaaagacctgaatcattgatgtataactttcgttaggtgattggaaaaaggccttagccgtgattggttgtgctgtaacacccttttttaggatcaggattaataacccacctaagaataagatcacattaatcaatgtgatggctgaaccaccgatgcttgttacttttttgactttatcaagccctttggatgtgacaaaagtaatcacaataatccaaataatagcaagaattcctaatgtttgcacaccattggttagcccaaagaatgtccaactttgcgtcttatcaactccgaaaatagcatttgataatggaatccaaatcccgttcccaacgttaaccatccaaatgatgtatgacgcaaaccacatgaaagtcccaataaaggcaaatttagcattgacggatttttccatccaagaataaatcccacccttagcttcaccaaaggcagcgcccatttccccaagcataaatgcgtaaggaataaagaaggttacagctgctaaaacataccaaaaaattgatgcatatcccattaagaagaacgctcgtggaatatttgtaaaaccaaagactgacgtgaaaatcatgagaataagtgcccctaaagtcaacttactcgtctttttcttttctgccaccccaaacacctctttcaaatagtttaatggtctaagaataatagccatttgcctaatattgttcattattaaattaataacaaactaactagtcatcttcattttacggtgcaaactggtttaggtaaacgctctatttcgttttctaatctaattattttgttttttaaccaaaaattaataatcttttcaattacttattttttatcagccgattttaacgttgtcgtttgatcctttttaacggtaatccgaatcgcaatcttataaaccacactctgacaagctaacttcaataatgttttttgggtttcagtcactaagccgctagcaggtttggtcccttgttcaaatggactgtattcttcgtccaattgatgaatcgcatctaagaacgtcaaaataaaataatcatagagttgcttttcgttacgatcagtcgctgttcccactgacagtaagcggccaatttcttcaattgaaaaattagtctttaataacgcaataatcaagacttgtgagatttgttgtttagcatagcgcttcttgtccggcgcaacgactaaccccttcttcacgtaattattgatcatcgcagcagtgatttcatctagatccaatacttctaaatattgattgatatagctgacgacttggtccatatataaattcaaacctggtaaatctgtccagcgaggtaattgtaatagttgtagttgatttaagtctcgttttaatagctcattattcataataatcagcctccttatatttaattacaattatatcatcatctagtttcaaaaaccataataaggcataaaaaaagagcttcccgaaggaacctcttaactaagactagtcgttagcttttggtgtaacaacttgttcgcctttgtagaaaccttttggtgaaacacggtgacttacacggtattcgccattagttgcatcgaattgtacgtttggtgtgttcaatttgatatgtccacgacgcatacgtttcttcgtctttgatgttcttcttgctggaactgccattattttcagactcctttatatcttagattcattaatgatataccgaactcagggaacttagcaaggattaaatcaatctttgctaaattgatttaaaatcaattagacgtcccactacttttgtccgcgacttctataatactatgtttacgtaacaagagcaagttatttcataaaaaacaatctactcaaggcattcaatcaaaacaaaattcgagattgaaactcatcatttcaacctcgaattcatgtttaatcttatttttaataaacacaaagtcaatcactgattacacgtaattgtataatacaaatcttgataaatcaatcataatccgactattttgaaaaagcttcttgcaaaaattagtcagttgctttgttttcaaatactaattgattgtcttttagaccaatttcaactgttgtgttaggtaaaacgtttccggtaataatttctttggccaacggtgtttcaatccgatttgtaatataacgccgtaatggtcgtgccccaaacgctggatcataaccttctttagcgacccataacttagcgtcttcagaaatcgtcaatgtgatttcttgatctgctaaacgatgtgataaatcagccaacattttaactacaatttgttcgacatcttgcaagctcaatggcgtaaacataatcgtatcatcaattcggttcaagaattccggcttaaatttcgtttgaattaaggtttgaacgctattagctgcttcttttgaaatttgaccttgatcatcaacaccgtccaagaggatttcagaacccaggttagaggtcatgatgataattgtgttcttaaagtcgattgtacgcccttgtgagtcggtcaaacgaccatcatctaagacttgtaaaaggatattgaagacatctggatgggccttttcaatttcatctaacaagacaattgtatatggattacgacgaacagcttccgttaattgaccgccttcttcataaccgacataaccaggtgccgcaccaacaagtcgcgatactgagtatttctccatgtattcactcatatcgattcggaccatgtgtcgctcagaatcgaagaggtcttcagctaaagccttagctaattccgttttaccaaccccagtagggcctaagaacaagaatgagcctaaaggtctattagggtcttgcaagccagcacgcgctcttaaaacggcatctgtgaccgcatcaacagcttggtcttgaccaattacccgttcgtgtaaatgatcagctaattgtaatagtttttgccgatcacctgctactaatttagcgactggaatcccagtttgcgaactaacaactgtcgcaatttcgttttcggtaactgattcttgaaccatccaatcctctggtttttcagccttttcaaggtcagcaagatcttgttccaattgcggaatggtggcgtgttgcaatttagcagctgtttccaaatcgtagttactttgggcatcttctaattgccgttttgcctggtctaattcttcctttttgtcgttaatcttgttcaaatcagctttttcggtttcccaacgcatcttcaaactattcgtcgtttcccgtaaatcagctaattgtttttgcgtttcggctaatcgtttttgtgaagccgcatccgtttcattcttcaatgccgcttcttcaatttccaattgcattaattgccgcgttgcttgatcgagctcagtgggttgcgaattcatttcaacgttgatattagcactcgcttcatcgactaaatcgattgccttatcaggtaagaagcgatctgtgatgtagcggttagataacgttgcagccgccactagggcattatcatggatacgaacaccgtggaaaatttcgaaacgttcctttaacccccgcaaaatactaatcgtatcttcaacggttggttcttgaattaacactttttggaatcgtctttcgagggctttatctttttcaatgttttgacgatattcgtcaagcgttgtcgcgccaatcatgtgtaattcgccacgcgctaacatcggtttcaaaagattaccggcgtccatgctgccttcagtcttcccagcaccaacgattgtgtgaatttcgtcgatgaaaactaaaatccgaccttcactcttcttaacttcttttaagaccgcctttagtcgttcttcaaactcaccacgatatttagcacccgcaattaagctccccatatcaagtgagacgatggttttatcctttaagttatcaggcacatcttttctaacgattcgttgggctaagccttcaacaatcgctgttttaccaacaccgggttcgccgattaaaactgggttattcttggtctttctagaaagaatccggatgacgtttctaatttcttcatcccgaccaatgacgggatccatcttaccttcacgaacagctttcactaaatcagtgccgtatttttcaagcgcttggtagttatcttcttggtttttagatgtcacacgctcgcctcctcttaatttggtaataatatcttttaattgtttagtcgtgacgttatttttttgtaaaaattgtactaacggattgtatttagacttcatcaaccctaaaataaccgtttcagttgataaaaattcatcttgaaactcttgcatgtaagtttgagccgcgttcaaaacttgatagagattttgtgaaatattttgaccatagtttgtttgaccttcaactgttggaatcgtatcaatctcgcgatcaatttcactttcaagtgcggttaaatcaattcccgcttcctgatagatttgccgacccagttgttggggttgaattaaatatttaaataaatgtgggacatcgatttctgtttgatgacgcgtttttgcaatattttgtgcttctgcaattgcatcttgaacagcttgtgtcatttgttctggattcataaacgtcattcctttttaggtttattttttgaattaaacgtcaatactgattgactaattctatgatagtcaaaataggtcaaacattcaagactaatgctcaaagataggacttaagtctaataaaaaagaggcacccaccaaaataaattcggttagtgcctcttatttaaattaaacttcttttgattgcattaattgcttcattttggcattcatttcgtgtaattcagcctctttatcagccaataatttatcatacgttgctttttgcttaacttgttctgcttcaactgcggctttgatttttgcttcttgaccttgttctaaatctgctttttctttagtccattgcttttgcgccttacgttggctcaatgaactcccagttgcggctaagaatgtgataatcgcaccgattaaaagcgacacaacgatcacgataatcaagggccaatcaaccgttgtaaagccaaaattaatggcaactggattaacattcaaaacggcaaaaaccaccacgattagtgcgagaattaaaattgtaattaaacgaccttgctttttcatcatacaacctcctatttcttattaaacaaattaccagcgacgtagtcaccaatatggggtgccaattgataaaattgggcgcctagtgacatcaaccacggtgcattaatttcgcgcttaggatgcccaatagcccccacaatcttgtgtgcgagttgatctggatcaagcacgatccagttaaccgatttaagatagttaccagtttgatcagcaatatcaaaaaaggcggtatcaatcggtcctggattaacagttgtcacttgaacaccaaatggtttcaattcaagccgcaatccgtttgagtagcctacaatggcaaacttagtcgctgaatagattgctgatttaggtgtcgccatcttaccggccattgaggcaatgttaatgatgtgcccacgttgtttttcgatcatctgtgatccaatggcccgcgtcaaatacatcaagcctaaaacgttcactctaaacatctgttccaccaaaggcatcggtgttgctagcgcttcttcaaaatgaccaaacccagcagcattcactaaaacatccggtatccccacttctgttgttaattgcgcaacaactgcttcaatcgcttctggggcactgacatctaattgataagcataagctgcttggcctgagagccgttgacattcgtcacgaaccgcttctagagctgcttgacgccgtgctaaaacgacgacaatggcacctttgctagctgcttcataggcaattgcccggcctaaacctgacgaaccccctgtaaccaccacaatcttttgttttaagtcttgtaatgctgctaaattttgcattttaattactccttccgaccatgaaatggaatatcatacaaatctaaatcgctaacgacacgcgtatttttgaaaatatcgcgggcatcattttgtaattcacgcacagcttggcctaaataacgggctgaaatatgcgtgagtaataggcgtttgacatgtgctgttttggcaaccttggctgcattgatattagttgaatggtagtattgacgcgcaattttttgttcttgcttgccaaatgtactttcatggactaaaacatcggcgttttcggctaggcgcgtaatcgcttcacaattgcgggtatcgccaataatggtcacaatccgtcctttttgtgcgttaccgatgtagttacgaccgtcaatttcgcggccatcactcaatgtgactgtttcaccatttttaatccgggcataaacgggacctgaagggacaccgtcagcttgtagtttttcaacctgtaattcaccaggatgatctttttcaacaattctaaaaccgtaacttgcaatccggtgatccaattttgcacattcgacccggaatgttttgtcatcaataatgacaccattttctggtaatacaacgaacttcaaggcatacgttaagtgactttcggaaagttttaaactcgtccgaacgtattcttctgttcctttggggccataaatcgtcaacggttcgtcgccaccttgaaatgaacggcttgataagaagcccggtaacccgaataaatgatcaccatgcaaatgcgttaaaaagattttcttaactttccgtggttttaacgttgttttaagaatttggtgttgcgttgcttcaccaacgtcgaataaccacacttcattccgttcatccaataattttaatgcaatactcgtgacgttacgttgacgggcaggaacacccgcaccagtaccaagaaattctaattccatctaactcttccattctatattaaatttaaatcaattactgcttaactaacgcttttgtaacgatcgccgcatattctttcacaccaatcggattaggatgcacttggtcatcatagaaccagtcaccgtgttttcttgcttgatcgtaccaattaataatcgttagatttggatactccttagcggctcctttaagcatttgattaacatcattttgccaaggccgcgttggcacgtatgcatttagccaaaagactttacgttgactaccaatggcagccataaattcatctaactgcgcttgggtaaatgagccgttggttcccaaactaattagaaccgtatcgctaagcgcgcctttttgggcgtagctatcaacaactggcgtactcttgttcaattggcgaccgacagaggcatccaccaacatattagggaacagtgtttgcaacgttttaccagcatcgagcaatacagaatccccaattgctgtaattggcatcgattgggctttttgcaattcaacctgtgttaacccgtacttctcatattcttggttaactgggtgtttttgagccgctgcttcggcctctttatcagcttgtgcttttgatttagcctttttctgttgcttattttgagccttggccttttcaactaaggctttattacgagcatcattttcttttttgttcttttgaatattaaccgcaagtgccgatttatgagcatccggcgctggttgccccggtgcttgaatcgcacctacaaggcccactaaaaagacaattgccatcccaaaaactaaaccggattgccgatttaacgttgggtgtttaacaaattgacgcattctctgccctaattcttgatatggataatgggccaatggttgttcaataaagcgatatgacaattcagttagtccgaaaataatcgcgacttcgatcactgggtataaagccggatgtgcagcaacatttttaaagacgccctcaaagaaaatcatcactggaaattgatacaaataaatcccataactgcgttttcctaaccagttaaagactggattggttaataggcgattccaatctgaacctggatgtgcaacaactgctaccaagacacagattagtaaactaaagatgaataagccaccccgataaacaaaggcactttctgcattcattttgaccattaagatcaacattgtaatggtgctcaaaagaccaatgccatctaaggtccatcgttggcgcggaataatcttttgtttcaaagctgtcgatggccagacaaaagctaaagcagcccccaccaagattgagaacatccgagtatctgtcccatagtaaagccgacttggatccgcatttggatgatatagaatggccatccagattgccgaaactaaaccagcacctaataaaacacgggcaatccggcctttattcttaaagccaataattaatgcgacaacgacaaacggccataacagataaaattgaccttcaatcgaaagcgtccataaatgtgtaaagggtgattcattattagcaaaccgatcaaaataagattgaccatggccaatttgccaccaattataaacatacaaaatattagtgataataatttgatttaagttatgcaacatctgccgttcaaataaagtaatatacgcacctgtcgcaaacaacatcgtcaataaacccggatagagtcgcttaacacgtcgtaaataaaaactcttcaaattaatccaatgattttgttcccattcttggaccagtaaatccgtaatcaaatagcccgaaaccaccatgaaaatcggaacgcctagataaccacctgtaaaagtgtacggcatcaaatgatacaaaataactccgataaccccaatagcccgtaatccgtcaaacccagtaatataacgactgttatttaagcgctttttccctgccattttctcaacctactctatattctaatataaaacattatagcaatgtttcccaccactgcctacttgaagctcttttttatattgatgctatagaaaaaggaagaatccagagtcgaatttcttcctttttgaaccctattattcgacaaattcaaacgtaaagttatcaattgccactaaatcgccatcatgagcgcctttttcacgtaatgcttcgtcaagtcccatagaacgtaattgacgggcaaaacgcatcacaccatcttgatgatctaagttactcatcttgaagagacgttcaaccttttcacctgtgatgtagaacgtaccgtcttcatcttgttcgacgttaaaggctggtccttctggttgatattgataaagtttttgtgtttgtgcttcttcaacatcacccattgggaattctgctgtttcagctaataaatcggctgtcttgttcatcaatggttgaacaccttgatgcgtaatacttgaaatttcgaaaatctcatgtgtatcaccagccgctgctaatttttgtttgaattcagctaataattcggctgagcctggtagatccatcttagttgccacaatcacttgtggacgttccaagatttttggatcatatgattctaattcatgattaatttgttggtaatcttcatatggatcacgaccagtttgatcgtccatttcgattaaatgtaaaacaactcgtgtccgttcaacgtgacgtaagaattgaatccctaaaccaacaccatctgaggcaccttcgattaaccctggtagatcggctaatacgaaatcacggccatcatccagttgaaccatccctaagttaggcaccaatgttgtaaattggtagctcgcaatcttaggtttagcacttgtgacaacagaaagtaatgttgatttcccaacagatgggaagccaactaacccaacatcagctaagactttcaattcgagttgaatgctacgttcctggcctggttcgccgttttcagcaatttcaggggcactattcttagcggttgcgaaatgcatgttgccacggccaccacgaccgccctttgcaatcactaattcttgaccatcttccgttaaatcgcctagcaattcatttgtgtcggcatcacggacagttgtaccaggtggcacttggacaaatgtatcttcggcaccgcggccatacatttgtttattctgaccgttaccaccactattggctttaaagtgatgacggtagcggaagtccattaatgtccgtagaccttcatctacgactagaatgacactaccaccacgaccaccatcgccaccggctggtccgccaagtggcacaaacttttcacgacgaaatgcaacagcaccatcgccgcctttaccagctttcacatcaattttgacttgatctacaaacattattttgactccttctcgtttctaaacagtaccttatatactacctaaatttaggctaaaagtaaacagacaacgtcataatcaatcataaagtcttctaattaatgatttttaagtaaaaaaagaagacgcattaatcatcgtcttcagtataacgcttattgtgcattcgggattaatttaaatgagctccaaggttttaaatattttaataagaataattcatctggtgcaatatggcccacaacgtttacccgaccatcatttggcattgcttgaagcgcaatttgggtttcgcctttgtattggccgtagccaacattgtcaatcaagatatcgccccgttttatatcaactgtattgtgggctgcaaatggtaagtctttataaatgacccgcgtcattgttgaacgcaggatgtattcagaacggtcaccacgataactgtgtaagctttcaaataataccttgcgttcatcagccgtaatatcctcagccacatcaatcataatcgctgggaattctgcattaaagaccgtttgcattgtttttagttccgcttcggaagcatacgcattgccaacaatgatgtcatcgatattatccattaacatgtaatgtttcatttgggtcgccatcgctaagtcccgatcaacttccatcgttggtaggccatcttgtgttggccaaggtccgaaagtcgcttcatgtgaattaacgaaagcagccgtatttaaattatactgtgcaaattgcgctgtacattggttaaagaagtcttcccctaaaccggaataacgatgtggatagaagttatggcagcccaataagttagcccgtttaggtgaaaaactcataatattgtcaacatagcttgtcccttgactcatattaatttcgattttaagatcgtatggattacgggtcatcttcgcttcttcttggcctgtaaacccgttatctaaccgaattccccaagcacctaattcatggaagaaacttaaatcatcataggaaataccaagttgttcaaacaaaccaggattaatgtcaatcatcacttgcatccctaattgatttgcataatcaaccacgcgcttgaaattagtaagcaccgcatcttgatcaccactgacttctaataatgatgtgaagactcgtttaaacccgtattgatgtgcaaggtctagataagccgcatccttttcaaaagttgatcgttctggataaattgaaacgcctaattttcccatgtctattacctcctaaaaattgggctataccgccctaacatcttttagtttatcatagatgactcatcaatgaaaacctttacacaattataaattcagttctctttaaattcatttgattgtttttgaacgtttttgaaatattttggttgctttttattgtaaacgatgacataatgaatgcacggaggtttttgatatgttaacagaagaacggcaccaagccatcctggatttattacaacaacaagatgtcgtcaaaatgaaagcgttatgccgcttattagacgcatcagaatccactattcgtcgtgaccttcaacttttggaagaacaaggattggtcactcgaattcatggcggtgctaaacgcctcaataaattacaggttgaattagggcaaatcgaaaaaacgagcaaaaacgttcacgaaaaaaatgaaattgctaagtttacagcttctaagattcaattagggtgcgtcatctatctggatgccggcacaacaactcaagcaatcatcccttatttaacacctgaaatgaatttaaccgttgtaactaacggtgttgatacagcttcacttttagctgatcatcatattcaaacctacctattaggtggccgggttaaaaataagaccaaagcgatggtcggtgcgggcgccttagaaacactgctccaatttcaatttaaccaagcgattttaggaactaacggtgttgaccaatattcaggtttaacaacgcccgatcctgaagaagcaacgctcaagcgattcgcgattcaacaggctaaccaaacgatggtcctagctgatcatacaaaatttgatgccgtttcatttagtaaatttgccgaacttacgcaagttcaactgattaccgatcaactctcccctgcactacgtcaaacttatcaaacacatacagatttacaggaggttttatagtgatttatacgattacggcgaatccatcaatcgattacgtcatccaacttgaaaaactaaatacaggtaacgtcaaccgcgttcaatctgacgtgaagctacctggtggtaaagggattaatgtttcaagaatccttgctgaattagcactccctagtgttgcgctgggttttgtcggtggcttcaccggtcaattcatccaaaacaaactcaataatgcatctattgactgtcgcttcacagaagttgaagaagatacacggattaacgtcaagttaaaagatagcgttgaagaaactgaaatcaacggccaaggccctcacatttcagctggtactgttgataacttgaagcaacaactggctaaattagaagccggcgatatcgtcttcatgtcaggcagtttgccacctaacttacctgctagcttctataaagacttgattccaatgattcaagcgcacaatgctgaattcgtaattgatacaactggtcaagccttattagatactttagctgaaaagccattggtgattaaacccaaccaccatgaactagctgaattattcgacacacaatttgctaaccaaggtgaaatcatcgctgccggacgcaaattattagacaaaggtgcccaacacgtactggtgtcaatggccggtgatggcgccctcttaattacaccagaccacgcttatctcggtggcacccctaaagggactgtgattaattccgttggtgctggtgattcaatgattgccggctttgtcgggacattcgcgcaacatcacgatgcactagctgctttcaaaacaagtcttgcttgtggcagtgccacagccttttcagaagatttagcgactagcgctaagattaacgaactcttaccacaaattgaaatcacacaagttgattaattttaaatacaaaggagatttattatgaacatccaagatttactcttaaaagatgcgatgatcatggatttacaagcaacgactaaagaagccgctgttgatgaaatggttgcccgctacaaagatatcggtgttatcacagatgataccctttatcgtaaagatattttggctcgtgaagcccaatcatcaactgggattggcgaaggcattgctatgcctcatgccaaggatagcgctgttcaacgcgcaactgttttattcgctaagagtcaaaatggtgttgaatatgacgcattagacggccaacccgtttacttgttcttcatgattgctgctccagaaggcgctaacgatacgcatttacaagccctagctggtctttcatcacttttaatcaacccacaattagtggctgatttgaaactagcccaaacacctgaagatgttcaagaactctttgctaaggcccaagcagccaaagatgctgaagacgctaaggaagaagcagaagaagctgctaaagcacaagccgctgctgcaacacctgctgatgaacaaaaaccatttatcgttgctgttacagcttgcccaactgggattgctcacacttacatggccgaagctgctttgaaagaaacagctgctaaaatgggcatcgatatcaaagttgaaacaaatggttctgaaggggttaaacaccaattaacagccgatgatatcagccgtgcaacaggtgtcattatcgctgctgataagaaagtcgatatgcctcgtttcaacggcaaacatctcttgaaccgccctgttatcgacggtatcaaaaaacctgccgaattgatccaaaaaacattggatgaagaaggttcaatcttccatgcaacagaatcacaagcaagcgaagaagcttcagctgataagaaaacactttggagccgtatctaccaagatttaatgaatggtgtttcaaatatgttaccattcgttgtcggtggtgggattttaatggccatctcattcctattggaacaaacagttggcgctcattcaacaacctttattttcttgaactcattaggtaataatgcttttaacttcttaattccagttcttgctgcttacatcgcgatttcaatcggtgaccgccccgctttaatgcctgggtttgtcggcgggtatatggccagtcaagcaacagctagtgtgatttcttctgatagtcctgccggtttccttggtggtttagctgctgggttcatcgctggttgggtcatcgttggtttgaagaaagtcttcaagaacttaccacaaacattagatgggttaaaaccaatcctgattttccctgttcttggtctattgattgttggctttatcatgttctttatggtcaacccagtcttcgctcaaattaatctctggttaagcacattcttaacgcacttaggggctggcaatgccttattgcttggtgcgattttaggcggtatgatgtccgttgatatgggtggtcctttcaataaggccgcttataccttcgcaatcggtgtcttcacaaccactaaagatggctcattaatggccgctgttatggctggtgggatggtgccaccattggcaatcgcggttgctgcaacaatcttcaaaaacaaatttacgggtagtgaacggaaacaagcctttgctaactacgtcttagggatttcattcattactgaaggtgctattccatttgctgcaacagatccattgcacgttatcgtttcaagtgtcattggttcagcaatcggtggtggtttaacccaattatggcaaatcactgttccggcacctcatggtgggattttcgtagccccacttgctaaccacggtttactctttgtccttgctgtattaatcgggacattcatcagcgctttgatcttaggcctctggcgtccagttgctaaagaatcttaatttaaaaaaagtcgcagtcaaatgactgcgactttttatttgccattaaaactagcgctttttaatggctatttagttgaaactttttaaaatgtgcccggagataacttaacgttaagctttcagtctgtgaagcgaccaattcagatggcgttccactggccatcacttggccaccttggctgccgccttttgggcctaaatcaattaaataatcagcattcgtcatcaaatcaaggtcgtgggtaatcataatcaccgttgcgcctttggcttttaattgattaataacgcccatcaaggtttccacatcccgtggatgcaaaccaacagatggttcatcgaagacgaataacgtcccggcccgttttttattcaaatgcgtcactagctttagccgttgcgcttcgccacctgaaagactcggggtactttcaccaaggtgcaaataacctaagccgatctctttgagaatcttcagttctttcaagatgttgggcacatccgcaaaaaccggtatggcttcttctactgataaggccaataaatccacgatgctatcaccatgccacttaattacctcaattgccggcttataccgtttaccctgacattctggacaaacttcttccatatctggtaagtattgaatatccaaaataatactgcccagaccaccacaattgggacaggcaccttctttattgttatacgaaaaatgggcaatcccataattgtgggcttgtgactccggtagcccagcaaataattttcgaagattcgtcatgatgttagtataagtcgctaaagttgaacgcgtatttttaccaactggcttagcatcaatgctgacgactgacgttaaatcggtcgtcaactgggtcacctgttggggaagttgctcatgcttatggtgagcctcaatcgccggtaccagactatccaagattaaactggtcttaccggcccccgagaaaccagaaaccgccgtaatttgattatccggtatttcaatggtcacatcacgcagattaaaatactgtccaactgtcattgtcgttcgaacacccgtagcttgcgttgcaactttggggtacaaaatattgggtcgaccggcaatgtatggtccaattaatgattgtgggtcttgcactaaatcggccggcttgccttgtgcaatcacctgaccgcctttgcgccctgccgccggaccaatttcaatcacccagtctgcttggctaatgatgttgacttcatgatcaacgaccactaatgaattgccctgcgccactaactgtctgaaaatatgaattaaaccttcaacgttatccggatgcaacccgattgacggttcatccaagacatacaaaacaccggttgttgccgttcttaaggtccgcgctaattgaattcgctgaagttcgccagtcgataatgtgttcccattccgtgacaacgttaaatagtcgagtcctaatgacagtaatggctgcaacgtttctaataagttcttaaacaaaatggttgccatttgttgcatctcgtctggtaaatcggctttagtagccgttacccaagtgtctaatgcccctagcgtcatatcagaaactgccgcaatattttgcccgccaacggtttgcgttagtagttcgggattgagccgtgtcccgtgacatgttggacaagttgaaaaatgaaaaaaagaattgaccttggccatcgcacgatcacttttgaccgattttaaagattcataaacggcgtcgtaggcattttcatagagtgtattttccgtactaaagacgcgaccggttgatgtgtgaaaatcgaccgcgtatttattccgcttaccatgcaagacgatttctttttccttggccgtcaaatttttatacggcacatcaattcgaaccccgatatgtgcggcgaccgttggcataaagttccgccccggtaaacgccaagaagcgattgcgccgtcttcaatactgagattttcatccgcaattattttgcgatcatctagcgtttgaatttggcccgtcccatgacattccggacaggcacccgctgaattaaaagcaaagtcctcagctgatttagccataaattctacctgacaagttggacaggtaataacgcccattttatcgccagctaaatccatcgcttgcgcaatctgcaaactaggttgaatcttatgcccgttcggacaacgcgtggtgcctaaacgtgaaaaaattaaccgcacaacattaaaaatttcactcatcgaccccactgtcgaccgttctgaaggaacactggggcgttgtcgtaatgcaattgccgatggaatatgccggacttcttgcacttgcgagcgtttattctgtgtaatacgccgccgtgtgtaagtcgagagtgcctctaaataacgtcgcgagccctccgcgtataaaatgcccatcgccaatgaacttttacccgatcctgagggccccgaaatcgccacaaattggttcaaaggaatatcgacattaatattttttaagttattgacgttaccgccccgcacttcaatctgtgttggttgtttaactgtcatgattaaccttcttcttttttagattgacggtccacaatgtctgaccaatcatttttatagtaactgttttaattgttccgcttgcacactacggacttcttctacaacaaccaacgccttaacatcgatttgtgagacaaccggtaccaaagtggcgagttgtttagccgtacaaatgacatacaacatcggccgctcattttggctgtaatagccttgggccttaataattgtaatcccttgttgaaactgcgtcgataacgtttcagcaatcgtttcgtattgatctgaaataatcgttaccgcgcgtttagccccaaatttagccagtagtttattcaaaacaactgctgataaatagagttcaataatcgttaagagcatattttgaaaaccaatgatcaagcccgacggaatggcgacaattaaatcgaaaaagagcatcgcagacccattcgggattcctaaatagcggttaacaatcttcgccagaatcgtactaccggcaattgtcccttggcaatgaataataattgccattgcaatccccatcaagacgccaccaatcaccgttggaattaaggtttgtgtcgtatggtagccgataaaatgcggtagcttcaaaaagagtgaaatccagattaccgcccaaactgaataccaaatcgtttgacgctcaaggtatctaaagccaattaccactaataggccgtttagaactagattcgtaaaagccggcggaatcgcaagtgcataatacccaatcgcggtgagtccggtcacaccaccctcaccgatttgatggggaatcaaaaaatcgttaatggcgatggcataaataaaggccccaatgataatgcccagtccgttttttaaaattacttttttctgcatttgtgtcacttcccgttccaaattagaataagcgtatcatacattgggggctagataaaagagtcattttagagcaacttgaaaccgccaaaaaacgccacaaggattgccctgtgacgttcaccaatctttatttaataatacctaaatcgatcatcgattgaccggttgcaataatcgaatctgctgccgatctttgttgccaacctaaaagctttttagctttttcattacttgtatcggcgtatttacccactaaagtcgctaacattcgtaaatccggtttgaatgtcgctgctagcttaataacactattgggaattgtcttttgcagtaaccgccttgcgtattgtgggaaagcatcacgtaagacatcggccacttctaacatagataatgtttcaccagtggttgctaagaagcgttcgccatctgcttgtggcgcagtcatcgctaataggtgtaagctcgcaacatcgcggacatcgacgtaccctgattttacttgtggcacagccttaacttggccatttaacagttgttcaacttgcacgtttgaatgcgaataaacggatgataaaacagggcccataacaccaaccgggttgacagctgctagtgataagccttgcccttcagttttaatgaagttccaggccgcctgttcagctaacgtttttgatttttgataaggatgaatatttttagcacttaaatctgaccagtcggcttcagtgtaaggcgtttgttgattaggatgccccgcacagattgccccatatgcagaggttaacacgacgcgcttaacattcgcatcgcgagcggcttttaaaaccattaagacaccattcacttccggattaatcatttcagattcatccttgaaatttaatttaggcgttggtgaggccacatgcatgacgtaactgaccccaaccatcgcagccggccattgctctggatgttgcaagtcggcttttacgatcgataaatcttcaatattggtaatcccgtttgcttgcatgctggtgacaatccgttggctcttggccattgaacgcaccgttgtccgaacggcgtagccctgttctaataattgtaaaataatatgtgatgcaataaaaccactaccaccagttactaatactaattctttcatcttcaattcctcgctttcgttacacttgtaacatctatggctttatattaaaataaaagacgttcacaaacaagcgattcatcagcatctgtgacagaaaggcaaaattgttatggcagcaactaaccatgcccaagcaatcaaacaagattcccaagaatacctcactaccgcattattacaactcctagaggcccatcaatttgaagatattacggtcacccaagtcgtgaaacgtgccggtgtcagtcgaatggctttttaccgcaactttgattcactcgaacaggtcttaatcgattattttacaccaattatcgaaacacacttcaaggccgtcttacagcaacaatccgcggaacttaagttagcggccctctcgacattttttatcgaattagaagcgactctgaaactggcggacaaacgcggtttcgaaccgatcgtccgcgacgtcttcacggacaatattcagcagttttatcaaacaattgacccctggcggtcactggatgcgattcggcaaaaatattacgtgcaattcatggcggttggtgtctaccaaatttggcgtgattggttactaggcggacaaaaagaatccttatcatttattcatcaactattagcaaatttacaacatcatatggacctggctgttagccaacccattagcggattaaaaaaacgttaggctagacaataatttgtctgacctaacgtttttttatagtgataatttaatggtttgcgcaactgtcttcgatattccgagtgcttcaagttcttcaacagacgcatctttaatatgcttcatcgagccaaaattcttcaagagtttcgtccgcgttttcggaccaacccccttgatatcatctaacttagaactcaacgaattcttaccacgtaactggcggtgaaaactaatcgcaaagcgatggacttcatcttgaattcgcgtcaataagtaaaagccctgactcttaggatcaagctgaatcgtttgatcggcttcaccaaataataacgaagctgttttatggtgattatccttaaccatccccgcaactggaattgtgagccctagttcgttttctaagacgtctttggcggcattgagttcaactaccccaccatccattaaaattaagtcaggcagcgctttgccctcttttagcaagcgtgaataacggcgatagatcacctcgcgcgtattggcatcttcgttggcgccggcgcgctctgccgtctgggttaatttatacttccgataaagcttcttctcagcgcggccatcaacaaatgtgaccatcgccgacaccggatcggtcccttgaatatgcgaatgatcgaatgcttcgataacatgaccatggggtaagccgagtgcatccataatttcatcttgcgcaccaaccgtcttgcgattatcgagttccaataagcggaacttttcttctaataccagacggctatttttttgcgccatttccatcaaggcttttttctctccccgttgtggcgttcgaattggtacttgcaaaatatcggataagacttgcttttcgatcccatctggcacgagaatttcccgtggtaacacattattcttacggttataccactggagaataaaggtcgccaattcttcttccggcgtattcacacatgggaagagacgtttttcccgccgaattaaacgtgcttggcgaataaagaagatttgaatcgacaaccagcctttatccatgtaaaaggcaaataaatcacgcggtgtatgatcgttagaaataatcttttgtttttcaacggttgcttcaatatagcgtaattgatcacgcaactcagcggcccgctcaaattgcatctcctgggcagccgtcgccattttctccgttaaatccttcttaacattgtcgacttgcccatttaaaaagcgtttaattttcttaatctgttcggtataggctgcttctggtacttcttggaagcaagcccccaagcactgccccatatgatagtacaaacaaggacgtccttgatgaccctgacagcgccgcaaggggtaaacacgttgcaagaagcgtaaagtctcctgagccgcataaacgtccggatacgggccaaaataatagccaccatcttttttgacatcgccagtaatcaataagcgcggatcacgttcattggtgatcttgatgtacggatagcccgtcccccgttttaacttgatattaaagtagggttggtgcttttggattaacgtaatttccaacaaaaaggcctctttatttgtcgatgtaatgattgtttcaaaatcgacaatttcagagaccaatttggccgtcttaccttcgtggctactcttaaaatacgagcggacccggttcttaagattcttggccttccccacgtagataatctgtgcgttaatatctttcatcaaataacagcctggtaaggctggtaataaggctaatttatgttcgatatgttcacttgccaaaaacaccactcctttaacccaaaacaagtgttcgttcctatattttacgtgtttttggctaaaatgcaactatcgacaattattgcgctaaaattttgtctaggaattgttgggtccgttcttcttgcggatgttcgaaaagttgcgttggtgtccctttttcaacgatttggctatctgccatgaaccaaacttcatcagctacttcccgtgcaaagcccatttcatgcgtaacaaccaccattgtcatgccttcttgtgccaaatcttgcatcaccttcaacacttcacccaccatttctggatcgagcgctgaggttggttcatcaaataataagacatctggtgacatcgcaagtgctctagcaatagcaatccgttgcttttgaccacctgacagttggtcactataagcatcggacttatcggctaatccaacccgttctaacaactgttgtgctttttttgttgcttcttcttttgattgacgtttgaccttttgtggtgcgagtcttaggttatctaaaaccgttaagttagggaatagattgaagttttgaaaaaccatccccatcttagtccgcatttggtccaattgcttttcagagagactcatcaagtcggtcccctcaaaaagaatttgaccactcgttggttcttctaaccggttcaagcaccgtaataaggtactcttcccaccacctgaaggtccgatgaccacgatcacttgaccagcttcaacatcaccactaaccccgttcaaaacaaggttatcgtcatattttttaactaattgattaattttaagcatgttgcatcttcctttcaatatggttgagtagtttcgaaagactaaaggttaagataaagtagatgaccattgcgacaaagattggtgcaacccctttgtaggttgctgattgaaccacttttaattggtaaatcaaatccgtcacaccgataattgaaacgattgaactttccttgattaatgagataaattcgttgcctaaggctggccagatgttcttcaatgcttgtggtaagatgatataccgcattgtatcgtgttgtgagagccccaaacttcttgaagcttccgtttgaccagcgtcaatcgcgttgatccctgaacgaataatttcagcgacgtacgcagcactgttaagcgaaacggcaattacaccagcgaataaggctggaatattgacccacaagccaatcccgaaatagacaaacatgatttgaatcatcaatggtgtgccccggacgaattcaatatacatgactgctaggctatggaatagtttattcttagaaagtcttgcaaaggcgagtacaaccccaatgaagatcccgataatgattgaaataattgtaatgaataaggtataaccaatccctttagcgaaataagaccagtagtgccacatacttgtattgtgcgtgttcgttttcatcaaactacccgcactctttaaatattgcggaattaatttttgttgcttaatttgagcgatactcttatttgcagcagcaactaaagttggtgagttctttggaaatgcaatcgctgaaccttgcatatctgcccctaagttaaatttaccgtcgatttgaactaattcaggatcattgctggcataagccgttgccactggttcttcggccacaatcccgtcaattttatgactcttaagtgctaatactaaatcaggcacttttgttaaacctgtaatctgtgcatttttaatttgttttttagctaatgtttgttggagactcccggtttggaccccaaccttcttaccgataaaactgttttttgatttataaatcttggcgtcggccttgttgacgaggatcgattgaccacctaagtaatagacatccgagaaatcgacactcttagtccgttcatcggttggtgacatcgctgaaattaccatatcgaccttgccagtttctagaccaactaacaacgcgtcaaaatccattgacttgatcactaacttaacgtgtaaatcgtcagcaaccttttgtgcaacgtcaatatccatcccaacggttttatttttgccgtttttattcactaaaaattcatacggtgcataatctgggcttgtccccaacactaatgtcttcttagcttgaacgcgactaaccgtctgccccgcggctgatacagcttggttattccccactaatagcgccactagcaaggctaatggtagtaaaatgaatgctaaactttttttgatagtcatttgatcccctcctatgatgtttttcataatacactactataaatatttatgcaatatttatttataaattaagaataattggcgaactgatttttatctggtatgatagactcacatcagaaaagagggatattatgggcttaaaagtaacacgtcaaacagatttaactagtttattcgacaaatttgcatcaattcccggcgatcgggaaaaaatggcagctgaagttgaagaaacggctgaaaaattaaaagaaacggaatcaaagacaactaaaaaagaataatcaaaaagaggtgcggacaaaattactttgtccgcacctcttttttaatacctgacttatagcccacgctttaattattctgcgtgtcgttctggatagcgttctttaagcttttcaatattttcttgtgctactttttcaaagtcgacgttattccattcagcaatctgtgatagataccagagtacatcaccaatcttcttggtaagtacttgttcatctagttggtggccttggaatgtatattttttgacaatatccacgacttcgccactttcgctagctaaacctaatgccaagttcgttaaaacttgttcattaccatatagcgttctgttcgctaatttttggtactcattaaattccattaacgacgacctccaatatcacattgttgttcgatccattcccagacggtatccttaccagcaccagtcaacgcactgaagcagacaaacttatcaacggggttaaaatcaagcgcctctttaatgatcttttcttggcgattccatttcccagttgagattttatccatcttagtagcaacgactaaaactggaatatcgtaatacttagcaaagacatacattgcgatatcgtcatcagttggttcatgacgaccatcgatcaatgaaattaagccgcgtaaattatcccgattagtgagataagcctcgataatttgcccgaatttttcccgttgtttcttagaaaccttcgcatagccataaccaggcacatcgacgaaataaagttcattttcaacacggtagaaatttagagtttgcgtcttccccggcttacttgatgtccgtgcgtaactcttacgattaattaacttattaattaaagaagatttaccgacatttgagcggccagataacgcgatttcaggtaattggtcagtggggtactgcgaagcagctaccgcactcatcaccatttcaacttcatgtacttccataataacctccgattatttccttcgaatgctagtttagcataaataaataattattgcgccgttgacttattttcaaatccatgtttagcggcacccttatgtaaaaaaagttgccgggtcgattacaccccgacaacttcatagtcattatgacgcttcttgaccatcagctaagaaaagttgtggtttagcagtgccatcaacggcttcttttgtcactaagactttgacaacgtcttcgcgacttggtacatcaaacatcatatccatcatgacttcttcgatgattgaacggagaccacgcgcaccggtattacgttcaattgcaaggtgagcaatcgcatgtaatgcctctggcgtgaattctagttcaacatcgtctaaagccatcaatttgctatattgtttaactaaggcgttcttaggttccgttaagatccgaactaagtcgtcttcagttaatttttcaagtgcagccgtgattggaatccgaccaatgaattcagggataatcccaaattgcattaaatcttccgtcacgatttgttgcatcaagctttgattttcatcaaccgcttggccagctttgctaccaaaaccaatcgtcttttcacctaaacggtttttaacgattgtttcgatgccatcaaaggccccaccaataatgaataaaatattggttgtgtcgatttgaatcaattcttgttgtgggtgcttacgtccgccctgaggtggcacgctagcaattgtcccttcaagaatcttcaaaagtgcttgttgcaccccttcaccagaaacatcacgggtaattgagacgttttcgctcttcttggcaatcttatcaatttcatcgatataaataatgccacgttcagcgcgatcaacatcaaaatcagcgttttgcaagagcttcaagagaatgttctcaacatcttcaccaacataaccagcttccgtcaacgtcgtggcatctgcaatcgcaaatggaacgttgaggatccgtgctaaggtttgggctaagaatgtcttacctgagccagtaggcccgattaaagcgatattactcttttgaagttcagtatcacctttttcggcaaccgtcatttggttaacacgtttgtaatggttataaacggcaactgagagcgcctttttagcttctgtttgaccaatgacataatcatttaaaattgcaagaatttcgcgtggttttggtacttctaataagtcattaacagcttcatctttaaattcttcatcgataatttctttacagagatcgatacattcgttacagatataaacaccagggccggccacaatcttctttacttgatcttgtgatttaccacaaaacgaacaagtaacagggccattcgttgtttctgtatcatctaacatactgggattctccccttcctatacatctatcatagcagatttctaatattagtcatctcagaccgcttagaaatgtaattaagactatatcacatcactgcgctagatgaaagtaatccgtttttaacgccatataacgcaaaagcgggttcaaagtagtcaccttgaacccgcttttagaaccgattaaagctcatctaactatctaattatttagcgtctttaacttcaacagctgaatcagcaatcacttcgatagctttcttaacaccgatatcatgttttaacatgtcatctgataagacgctgcgaacagctgattcttccatgttgtattgttctgctaaactcttaagttctgcagcaacttcttcgtcagttgcttcgatcttttcagcttcaacaacagcttctaagacaaggcttgtcttaacgcgtttgtcagcatcaccggcgaattgtttcttcaaatcatcttctgttgtaccagtgatttgatagtacatttctgggttgataccttgttgttgcatgttacctaagtattgttgtaattgactgttgatttcttcgtcaatcattgcttgaggtaattcaggaattgttgcattttctgttgctttagcaacggctgtatcttggatagcagcgtcagcagcatcattcttttgttgttttaattcttcacgaattttttcttttaattcgtctaatgaatcaacgtcttcgtcgatatccttagcaaattcgtcatcaagttctggtaattccttacccttaacttcgtgaatcttaaccttaaagattgcttctttaccagctaattcttctgcttggtaatctttagggaatgttactgtaacgtcaacatcttcttcagctttgtgaccaactaattgatcttcaaaaccaggaatgaatgagtttgaacctaattctaatgagtagttatctgcttggccaccatcaaaaggtacaccatcaacagaaccagcataatcaataacgactgtgtcgccattttctgctgctgcatcttctttaagtactaattcagcttgacgttcgcgacgtgtttcaagttcttgttctacgtctttaattgtaatacgacggctttgttttggtacttctaagcctttgtaatcgcctaatttaacttctggtttaacagtgacttgagcagtaaggacccaagcttcacctttttccattttttcaacattaatttgtggttgatcaactggatcaatccctgcttctgcaacagctgcttcatatgcttctggtaatacagcatttaaggcatcttcgtaaagtgcttcttcaccgtacatcttgttaaagatttggcgaggcatctttcctttacggaaaccaggtgtgttgatgtttttacgtacacgtttgaacgctacgtctaaaccttcactaattttatctaaatcaatttcaaaggtaagttcaccatcattggcgccctttttttcccattttgctgacataatttccctccgacagttatattcacaatctatcaattgcatacttaatcagcataaactatttgacctaaattgtaaatatttattggcctaaaaaaccgataaaatccgtttttttagcgattaaagcgcattattgattgaatcttatgtataaaaaaactcgcagcttttacactacgagtttttccaattcaactaagttgaatattagtcaataatttcacttacgacaccggcaccaacagtacggccaccttcacgaacagtaaatttaagacccttttcaatagcaactggtgagattaattcaacagtaaatgttacgttatcaccaggcataaccatttctacaccttctggtaattcgataacacctgtaacatcagttgtatggaagaagaattgtggacgatagtttgagaagaatggtgtatgacgaccaccttcatccttgctcaagatataaacttcacccttgaagtttttgtgagtttggattgaaccaggtttagctaaaacttggccacgttcgatgctttcgcgatcgataccacgtaataaagcaccaacgttatcgccggcttgaccttgatccaatgtcttacggaacatttccaaaccagtaacagttgttttagcaacttcttctttaagaccaacgatttcaacttcgtcaccgacagtaacttggccacgatcgatacggcctgaagcaacagtaccacgaccagtgatcgtaaatacgtcttcaacaggcatcaagaatggtttgtctgtgtcacgttctggagttgggatatattcgtcaacagtagccattaattcttcaacagctttaacgtcgtcagcattgccgttcaatgcaccaagtgctgaaccgcggataactggaatatcgtcaccagggaaatcgtattctgataataattcacgaacttccatttcaaccaagtccgttaattcatcatcatcaactaaatctgttttgttcaagaagacgatgatgtaatcaacaccgacttggtgagcaagcaagatatgttcacgagtttgtggcataggaccatcagttgcagcaacaactaagatggcaccgtccatttgagcagcaccagtgatcatgtttttaacgtaatcagcatgtcctggggcgtcaatatgtgcataatgacggttttctgtttcgtattcaacgtgggctgtattgatagtgataccacgttctctttcttctggagcagcatcgatgtttgcatagtcttgagcttcagccaagcctttgtctgccaacatctttgtgattgctgctgttaaagttgttttaccatgatcaacatgtccgatagtaccgatgttaacatggggttttgttctttcgtaatgtgctttttctgccattaaacgaacctcctgtattttcgcaagaaaaaatcagcgtatagcatttcactaatactgataatcctttacgtaatattataatacttcaagcgttaaaatcaaagtgtttttttacgcttaaagaattcaaaaatgattatatctgctatgagcgcgtttgtaaacacttaagccttaaaaaaagtattattttacacataaaatcgttgttttctagccctaaaagactagttcttctgttaattcttgcaatttttttagccattgaatcgtcttttctgaaatctgaactgttggctcaaacatagacagtcctaactgctgaatcagtgcctggccccattcttcaggattatcgatgactgtttcctcgaagggataaagataagcaaacgtcatttgacactccgctaaggccgcttcgaggatgatgggatcttgttgggctaagatattctgaattgttttttgaattaattttaaaatgggccgattagccatcaattctagctcgccgggaaccacttctcgtacttgttcaaaccaattaatcgtcactgcttttgaataccgcagacgaacgagcgtttctaagaccgtcgtttttacaaatggatgactgtacggattcaccaaaattggtaacacaccctgtaaataatcagctagtggtaataattctgcttcatcaagtcgttgttgttgatcctggaaatcaccggttgtaaggttgtaaagtcgttcttgccgtttcttaattgtctgcttttcagccacctgataggctttttcagccgttcttaacgtctcttgtcccttttgcttggtctgctgttcaaacacgtcagtcgcctctacagtagcccacaattcgttggccgcgatgaagtgttgattatcaatgagtagcgcattatatagcaaccttaaatcgggctcattggtatagaaggccttcttctcaaatgctaattgtaaggcgtgccgattatcgccagcagccaccagtacgctgaccaataaaaggtttaataccgttgtctgttgtagctcgtaagcagcctctaaaggggctattgcctctggccatcggcgctgattaagcgctactttgcctaaacggatcaagttttcaaattgattcggcagtgccgtcacttctcccataatgacctctcctctttaaaaacactaaattaaaagggccccgataaataatcctttatccggcccttttttaagtgtcatcacttaattaatcttgttttttctcaactactggtttagtgtctttcttttgacgacggtgattttggttaatttccataattaccggtaaaataactggacgtcgttttgtttgttcgtataagtaatgacttaaattttcacgaacgtcttgtttcaaatggctccagtcaaattctttattatcaagattgttctgaacagcttgtttaatgatttctgaactctctgccatgagatccttgcttgttttaacgtagacaaaacctcttgccgttacttttggttcagcaataatcttcttattcttccggtcgattgtcacaacggcgataaaaataccatcttctgacaataatttacggtcgcgcaagacaatgttgccgatatcgccaatgccactaccatcaatcatcacatcagtggcatcaacttggcccccaacatgcatcttaccattgtcataggcgacaatatcacccttaccgacgataaagatattcttataatccatcccggtttcatgggcaatatccgcatgcgcagccatttgtcggtattcaccttgaaccggcattaagaattgcggatgaagtaaattcaacattaattgtagatcatttttattagcatgacctgaagcgtgtagatcatcaccgacagctttgacctcgccacctgcgcgataaatcatatctttagtcttcgctaagatggtttccattgcatgtgaaggagatgtcgtcaaataaacaagatctccttgttcaatatggattaagcggtgatggcttgttgccatcttttgaagggctttgattggttcacccatccggcctgtttcaaggattaccgtttcctcaggtgctaatgtacttagcgctttaggttgcactaagatgtcttcatctggcaaggttaacatttctaagcgcattgctgttcgcacaattttttccaaatcacggcctgttaaaacgaccttccggtttgttttataagcggcatcgataacttgttgaatacggaggatatttgaggccactgaagccacgataatccgcccgttttgatatttaaatgtttctaaaattgattcggcaatatcgcgttcattagccgtttcaaaaggtgattccgcattagcagagtcactcaatagggctaagacgccttgttgaccgatttcagttaaacgggcataatccgtttgatacattggtaatgctgattgatcaaacttgaagtccccggtataaacaatttggccttcatctgttttcacaacaatccctaacgaacctggaatggtatgcgttgttttgaagaatgaaactgtcgcttgttcaaaatcaattgctgtattggcattaatcacgtggaaattattgaaatgccgtaatttaggttcgctgctgaccgtaatcttagcgagcgcaattgttaattcagaaccaaagacaggcacatcatggcctttcaagaagtatggcaaggcgccaattgcatcagcgtgaccgtgcgttaggaaaatcccagcgacacgttctgcattttcttccaaataagtcatatctgggattacaatatcaatccctaataattcagtttctgggtattttaacccacaatctaagatataaatttcgtcgttaacttccacaacgtttaaattcttaccgttctcgcgtacaccaccaagtggcataatcttaatattactcattctttcacctctaaaattgaaagggttactttcaaactattatttgtttttttgagtgttactttcgtttaaaactcatccgctttaaagtctaatacatattttatcacaatttaaacaaactaacagcttttgattactaaaggccttacattttcaagttcatcttaaaaaagcgcacaaaaaaagcaaacagccaaaaagactgtttgcttttaaaggttgaattaacgacgtaagccaaggctcttgattaattcacggtaacgttggatatcgttgtcacgtaagtaacgtaaaaggttacgacggtgaccgattttcttcatttgaccaacatatgaatgatgatctttcttatgaacagataaatgttcgtttaatgagttgatttctgcagttaagacagcgatttgtacttctgctgaacctgtatcgccttcgtgacgtgcatattcattgatgatttcgttttttcttgcttgtgaaatagccattgctaatttccacccttcagttatattacccgaaacaacgaatagcgtcgggtgaacgtcgctaaacagagtaacgggtttgtgcttttaaagcactgtcttagtttactaaaaaattatgctgaaagcaaggctaagttcaaattcattaagcagtcaagtttaaatactttacaagtttctattgcaatcccccacactattttggtataataacgtctgttgaaattaaaaatcttttttataaagatagtgaaacccatcggaggtgaacaaccatgccacaaattaaatctgctatgaaacgtgtgaaaacaattgaaaaagcaaacaacagaaacgcttctcaattaagcacaatgcgttcagcaatcaaaaagttcaaagctgctcaggctgctggtaacgaagaagctgcagacctattgaaagctgctacacgcgctattgatatggcctcaacaaaaggcttaatccatgctaacaaagctggccgtgacaagtcacgtttaaacaaaatgatggctaagtaattctaaccaatattttaataggcccgactaagacgttttcgttttagtcgggcctatttttttgtgttttatgccacttttttagcggcaaattggagcatgaacaattcaaataacaattcaggttgtccctgtccggttttaattttaacttcgatttcttctaaacctaagtaagcttgcgctaaagtttgctttgaaaaatgtttaatctgttgcatcgccaatttaattcggtacggatgaatttttaaaacactggctagattaccctgactataccctttttcgaataaaattttaacttgcaatagtaagcggaattgaccgatcagaatcgcgttaatcttgagcggctcttctttttggagtagtaattcatgatacatcgtcaaaacggggcccacttttttctgcaaaacaagcggtactaatgaaaagacgttatcttcaatactgctgctgaccaattcagcgaccgctgctgtcgtaatttgcttagtttgttgtgcgtacagcattaatttcggtaattctgccatgatttggctatagtcactattggttttactaatcaataaggctaacgcttcactttcaatctgcatcccctgttgcttcaactcagcggttaccaactgttgaacttggcgctcattcactttttcaacagaaactaatgaagcaaccttttttaattgcttcacgatttttttacgttcatctaacttagggtacggcgcaaatagtaccacacttgttgttggttgtggcttttcaagataggcttggaaacgaactaaatcctgatcgagcttgtttttaaccttttcacccgttaaaaaatagggattttgcataaagacaattcgccgctcaccaaaaaaaggggccgattcggcatcatccaaagcattcgccacatcggtcgttgctaaatcatagctggcaaaattcattgtttgttcttcttctggtagatagtgtttaaagagttgacgcgctttttcaatcaacgctgactcttgccctaaaaccaggtaaatcggtgctaattgattttgttgaagctctttttgtaattgttcaattgtcatttttcactatcctttattgttgtttgcagtttttcgctttgaccgggaccgtacgcccaggtcaacatcccctgctgcgccgttagccaataaggcactttggccgcttgcaaagtcgtcaaagtttcctggtgcggatgaccataacgattctctctgccggttgagattaatgcgccttttaagtgcaattttttaatcacggtggggtcactagccgttttactaccatgatggccaacttttaaataatcgacggttaattgtggataccgctcgataattgcccgttcaccttcttgttctagatctcctgtaaaaagccagctagccccaccaatttgtgcctgtaagactaacgaatcactattttcgccttttcccggcttagtcggtgctaagacgttaaatttttgcgatcccactttaaaagcggccccggctaaatagggttctatctgaaccgttgctaaaaatggtcgaatttgtctttgaaattgccgattttgcggtaatccggcagcacaaatgattcgatcaacacgaatttgttttaaaatctggttcaaatcaccaatatgatcggcatcctgatgagaaagtgccaccgcatcaatgtgatctactccttggctatagagataattaaccgttactttttccgctcgtgaaacctgcgcccgccgttgccaagctgcttgcggtagcgctaggcgaccaccagtatcgattaaaagctgatgccggttaaacggcgtctgaatcaacagactatcaccttgaccaatatcaaacatgaccacccgaccagtcggattaaaatgaatcgccaaaaaactagccagatacaaacttaccaatgtgcgtttcagccgtttacgccattgattactaattgcctggccatcgattaacaagagactgaccgtcacaatcaatagtaacggtaataatggtattttaccaaacgtaatcatcgcatggggaatttgagcaactagtcctaagcctttgtaaatcaactgtaacagccactcacatccgttaaccactagattgctaacaggtaacatcacactcgctacaatcaccaaacctagcacaattggcagatagataggcgttaccaaggcattcatcattatcgtcagcacatgccagcgataattaaagcgtaagcaaaccggcaaactcaataaacttagccagtaagcaactttaaaagtgctaccctcaccaatataaatgagcgcaaaggccatcaaataacttaaaatcccgcccatactatgtagcaaataaggctgccagaataaattgaccagtaatactaaactccaactatctaaccttgattgccgaatgcccaactgtttgcaaagtaaccgggataaaataagcgcaatcgcgcgactaatgcttgtcgtaccaccaaccagtaaggcatataccggcaatagcccaaataacatacagtttaaccactcacgcggtatgcggcaataagtcgcacaccaccgaatgacttgcactaaataaaacacgtgcaaccctgatagacttaagagatgaataatccctaagtggcccaaaacaacctggtaatggtcaacttgcgcttcccgcaaacctaatagtaacgtctgcgcatgaaaccgtagtgctgttggtaacttacgtaaatacagtgcacacgtttggcgccaataatgtagccaatccaaaccgctactagggcgtctcagcgcaaaagttgtttttttggctaacgtcagttggtaaaagcagcgcttctgttgcgctaaaaaacgggcataatcaaactcattttgattggtagcaccctgtatacgtttaaaatctttttccccatagaacaaaacggggtgtcgtacttgctgccatcgccgcttctcggcgaacgtttggcagcgataataagccttaatagtctgaccatcttgttggccgattgccgttaattggacactatcgcccgctacttgaatcgcatcgggttgcactttaaagtactgtgctaccggttgttgcggttgcgtcacactatgatagcttatccaaaagcggcccccgtaaacaaggcataagccgatcgtcataatcgttatctgagtttgtctgagacttattaatttgacaaaagccaataataataagctccaggttaaccaagattgccccccaagcattaagctatttaaactgattaaacaaataactggataaatccagttgtttttcattcagtcgcttgttcgttctccaagaaattaacgagtgtgtgcgcatcatcaactgataaattaacttgatcaagttcaatccctgatttttcaattaattttagcgcgtaaggatcattatgataatctttttggtaatgaatcttactgatacccgcttgaataattagttttgtacattgtaaacaaggaaaatgcgttacataaatttcagcgccttcggtttgaacgccaaatttggcacattgcgttaaagcattcatctcagcgtgaatggttctgagacaatgaccatcccgcattaaacagccaacgtcaatacaatgatcttcgtgagccaccgagccgttataacccccggcaataatccgccgattacgaatgacgagcgcccccacaaatagacgtggacaggtactgcgcatcgataataaaaccgactgtaacataaaatactgattccaaggcattctcttattggccatcatcatgctccctttaattgtttctttctagtatagcaaaaataccacttgataaaactaattcacacaaatttgtgattgcaattgttcaaacgtcttcggaccaatcccgccgactttttgtagatcttcaatctgtttaaattttccttgttcatcacgataagcaattatttgttcagctttcttggggccaatgccattgagggtctgaagctgcgtactatcagcctgattcaaatcgattttagcagtgtcactcgtgctcgatgcattcgcacttgtcccagttgatgcctgttcttgcgtacgctcactggtcgttgcgatttgttgtggcgcttgaatgagttcttgatcagtaaccacctctccttttttcggaatataaataatcagttgatcggttaacttttgagctaaattaagccgcttggtatcagccgcatcagtcggaccacctgcatttttgagcacctcaaataagcgcgtttcagagactgtgatcggataaattcccgggtagaccaccgcaccttttatatcgacaaaaccgccttttttcttggttgccgcttggtgtgtcttcttagtagcgggttttgttttagacgcactggttgctagcagttgctcattttgcgttactttttgtttttgttgcgattgatgccaataaaagccacccgcgatgatccccaatagcactaagcaaggcacccaccaaaaacgccgatatcgctgccaataatcttgccacatcatcgtcacctccttactcttatatacccttaaagcacaaaaaagtttgccgattttatcttcggcaaacttttttaatggtttttcaaataagttaacgcatcatctaaggttttgaccggtacgatcttcatcttagtatgaatttttttagcggcatttttagcgattgtataattattttgataatcaggatcaacctttaaaattgcctttgttacaggatcattcggtgcaaaaaagaccgttgcgccttcttgactagcgaccagtacctttttatcaatcccaccaatagcacctacagtaccatcagcagccattgtgccggtccccgcaattgtacgacccttttggagattttgcttcgttaattgattataaacttgcaacgtaaacatcaagcctgcagatgggcccccaatatcaccggcatcaattttaaccgggatattggtttcgattttagaatgatctgttaacgtaatcccgaggcccggatgatgcgtccttggtaatttaatcaaacgatgcgttgccgtttgatgtttttgaccatgatcgtaactaaccgtgaccttttgaccaactttcaaaccttggacatactttacaaaagcattggcatttttaaattgatgatgatcaatcgcggtaatcgtatcaccgactgctaaatcatctttaaaagtggagttgcctaacatcgacatcacataaacgcccagatacttcgtatggtaggccttatcagcttttttataggcggcttcaacggcagcgttaattgaactatccatatagtacttttgaatctgttcgtaagcttcggtatcttcattgcccatcaattcgtcacgactttcaatttccgtaaaaggttgcgtcttggacaataataattgcaacggtgttactggacctctgacaccaacagttgtcagcataaaatggcctttttgatgatcatgtttaccgtcgaccttaacatattggctggtattttctgcggtcccggcaccttcaatataatagccagtgggcattaaacaaacaactgcaacaatgattaaaaccacaattacaattaatcgttttgtcagtttcttattttttggcatgctaatctcttccgtgttttaatttttcttgaagtgcaactgcgactgctggtggcactaattgatcaacttgaccaccaaaagcagcgatttccttaaccatactagatgaaataaacgaaaattcttgttttgctaataacaacacggtttctaattgtgcatcttgcgtttgattgagcgctgcaatatcccgttcgtattcgaaatcattagcattccgaataccccgaatcagatagcgggccccaactgcttgcgcaaaattagcggtcaacgttttaggttgcgctaccacactcacattgtccaaatcggcaatgacggtttcaatcaatgcgactttagtgggaccatcaaataatggcttcttcgctgcgttagtcatgactgcaataatcacgcggtcaaataaccgacttgcccgttcaactgtatctagatgtcctttggtaaaaggatcaaaactgcctggaaataatgcgattctttcagtcatccgaccacttccttaaccgataaattcgaaaattgccacttcagtaatcccatagttttgttggcgtttcaatgtataatgtgggatttcttcagggtacgttaaactcgtgtctgtttcacaaagaataatcgcccctggttttaagagatccatcttcacaaattgttgtaattcgactaacatttgttgttgtttatagggtgggtctaacaaaattaagtcaaactgttcttttgcatctgctagttttaacagtgctttttcagctggcatcttccagattgtgaaacattcaggcatctttgtcactgctacgttatcttgaatcgtttgaattgccgcgtattggcgatcaattaaataagcatggtccataccacgcgaaacagcctcaatcgcgaggccaccgctaccagcgtataaatcaagcgcttgaccaccatcaaaaaattgccccagcatactgaacatggcttctttcactttatccgttgtgggtctggtcttcattccggggaccgcctttaagcgacggccaccaaattctcctgcaataatccgcatctctttactcctttaatgccgctttagtagcggtctcttgattcgctaattcggctaatgcgccaaattccatatcgagcatggggcgttgcgaacgcgttactcgtttaacatagtgtagtttctttaatcgttcgataaccgccggtgcttggtccgcatcaacgtataaataaacgtatttcattcgtttagacgtataatacacaagtccgtaacgtcgcaattgtttgacttgccgtaatgaatacagccaaacaacaatgccttgtcgttgcgtcatttctaatgccattttatcagtccttatcttgtaatttattcaccaatcacaaccaaggtatgaccctctgtacagataatttgaatccgctggtaggcttggtcgtgaattgctcggtaaaatgctggattggtctgccgttcaaaaatgagctgttgcacactgactggctgatcaaaataaaagagctgttggttagtcagttgataatcttctaaagccttggcggtaaaatccgcttcagttaatttttgtggtaaagccatttggcgttgttgcttggcacgcttcaatcgccgctccccagcatcagttaacaacgtcttaggcgcgtctttcagcgtcgccaaaaataattgatccgcttcaagtaacacgtcgctacgcaactcaggtaacttggcattgagtcgcaatgtctgacaatactgcaacagtgctaattgccgttcatcatcgatttgttgggactgtcccgttaccacttctgggactgggactggcgtcattgaggtcaccggatataaattcgattgtaacaggcgattagcattcaaataaaccgccgttgccaactcacctttttgcattaccaaaatcgcataggttttattcttaaatgcgatcagtggtcgctgccgctgttgcgcttcattcaactcaatttgaaacttttgctcatgtaaacttaattcataattagccggaatcgttgtttcctgtgtgattacttttagcgattggccaaatttaaacggcttaatcatattatcctgaccaatcaccactaattgttgtgttgtccctgtttgatcatcaattgtcgcttcaatataatgccgactattcaattgaaataaccaacgactctgcagaccatcttctgccgattgtttaacaggttgcccatattgcgctatcaattttgcggcgggttgattgataaacttcgccggtccttgcgtttttaataatggattttgcggatgcgttaatttcatatgacgtttagtttggccctgcgtcgaatccacagttggttgaacatgatgcataatgggccacgcatacaacaatactaaccacgcgcctagcgctaccacaaagcgcatcaaatttttcatctgtgagccctcacgattgcttcattttgagtgcctttttttcctgagcactgacgttcaagaccaaaccaagacccatcgctaacaccaacatacttgacccaccataactaatgaagggtaaggtcaccccagtaattggcagcaagcctaatagaccgccgatattaaataaactttggataaaaataatcgtgcccacaccgtaacaaatcaaggcattataagtctgacgagctctaatcccgattgtaaaaattctgaaaattagtaaaaagagtaaccctaaaatgaaaagggcccccacgacaccgagttcttcagtcgtaatcgataaaatgaaatcagtgtaaggttcaggtaaataacctcgtttttggatactattgccaaggcccataccaaaccaaccaccattattgatcgcataatacgagttaactaattggctcccacccatattttcgagtttgaacggttctagaaaggctaaaattcggttaaaccgataattgacaccggttgttaaattcaaacgactcaatccagcaatggccgcaatgatcaccgctaaggttgcgctgatgattgaaattccccaccagaaggaaatcccactggcaaataataataccaatagaataattcctagaatagccgccccaccagtatcgggttgtaccaatacaaaggcgataatgacggccaccaaaatgacgggggcggaaaatagccgcacattatcacgccaatgctctgacaaattcttttcacgtttggataacatattagccaagtataaaacaatcaataacttagcaaattccgccggttgaatactaaaaggtcccaagttaatccaagcagtcgccccattaatagcggcgtccggtctaattcggcttaataccaacaagtaaaagagcgctaataaaataaccgccgtgacaccaattaaaaacttaggtttccttaacagatttaactttaaaaagaaggagaataataataagataaatcccagcccaataaaaattaattgcttagtaaaataggcatccggctttgccccatgaatcgacatcaaatccgaactcgccgaatagaccatcaaggcccctatcgcacataaaataacgtacgggattaataaccaataatctaaatactgcgctttatctcgaagcttatgccacacacttacacctaatttctatgaacttcattctgagcttgcgtttgataaatctctaaataaagttgattaatacgcgtttcaagttcattcaccaatttcgatccttcttgatcactaattaaacgaactcttttggcaaaatcaacctcttttgtaaaaccaaacagttgtgtatcaataatttcttcaatgatgggacattgacttaaacaaagcgcatcaaattgctttgtcaataacgcttcaattttagctgcgtctgatttcaaagtcacatacccgattgtttcttgtttaatcatcatttaacgcccacttaaactgttatagtaatgcacactctgcaggttattataccatatctgacactaaaaaaaggtagcctaaagtgtcttaggctaccttttaatatagttttaaacttattatccgcgtttacgcttcttgtcagctttagtacgcatacttgtgtcaagaatcttcttacgtaaacgaacagaagtaggtgttacttcacagtattcgtcatcgtttaagaattcaattgattcttcaagtgacatttctttaggtgtcttgatagcagctgagtgatctttaccagaagcacgagtattcgttaagtttttacccttagtaacgtttacggcgatatctgtatcacggctgttttgaccaacgatcataccttcataaacatcaacgccagcgccgatgaataattggccacgatcttcaactgattgtaaactataagttgttgatgaaccggcattgattgaaactaacgcaccgttacgacggcctggttcccagtttttgataactggcatgtatttttcgaaggtgtggttcataataccgtatccaccagtcatcgttaagaattctgttgaataaccgattaaaccacgtgaaggtgctaagaaagtcatacgtgtttggttattagcatcactttccatgttttgcatttcacccttacgttgggccattgaatcgattactgaacctgtgtattgatcaggtgtatcgatttgaaccatttcaaaaggttcgcaagttacgccatcaacgtcacggtagataacttctggacgtgataattgtaattcgaagccttcacgacgcatttcttcaaccaagattgaaagatgcaattcaccacgacctgaaacgatccaagcgccggctttgtctgtatcttcaacacgaagtgaaacgtcagtgtgtaattggtgacgtaaacgttcttcaatcttacgaccagtaacgaaatcaccttcacgaccaacaaatggtgaatcattagcagcaaatgtcatttgtaaagttggttcgtcaatccgtaaaattggtaatgcttcttgatggtcaactggtgtgacagtttcaccaacgtagatatcttccatacctgaaacagcgattaaatcgccagctttagcttcttggatttcaacacggtctaaaccgatgaaaccaaaaatcttcgtaacccggaagttcttagcagaaccgtcaagtttaagaacagaaacttgatcaccgattttgattgtcccacgagaaacgcggccaataccgatacgaccaacatagtcgttataatctaacatagccacttggaattgaagtggttcgtcactattatcaactggtgctgggattgtatctaagattgtgtcaaagataggaaccattgtgtgagcttgtgtgtctaagtctgattcaagacttgatgtcccgttgatagcacttgcgtacacaactgggaattcaagttgatcttcgtcagcaccaagttcgatgaataattcaagcacttcatcaaccacttcttcaggacgtgagcctgggcggtcaattttgttgataacaacgattggtgttaaatgttggtctaaagcttttttcaaaacaaaacgtgtttgtggcattgtaccttcaaaagcatcaacgactaataatacaccgtcaaccatcttcatgatacgttcaacttcaccaccgaaatcggcatgtcctggtgtatccaagatgttgatttgtttgccgttatatttaacagcagtattctttgaaagaattgtgatcccacgttctttttcgatatcatttgtatccattgcacggtcagaaatttctgcatggccatccaatgtatctgattgttttaacatttcgttaactaaggttgttttaccatgatcaacgtgggcgataattgcgatattgcgaatgtcttctctttttttcaagtgtttcagcttcctctcgctagtgacttaactagtgttgtttgtctcatgtatacaagctattattttaccataataaacagggctatgcttcttatattagcgattttttgaaaatacgcaagactttttcatgaaaatctaattattcggccgtttttgaatgggccataatggcgataatttcttgcatcgcttgctttggtgcaataatcatcccttctttggcaaccattgaaattggttgaccatcgaaatttaaaatctgaaaaccaagtgtctcggctaaaacgcgtcccgcagcaatatcccatggtgctaactttgaaatataagcttgcgcattccctcttaacaattgcgcaaaggtaatgccggcactgccataaatacgcacacctgaactttgaacgaagacctgttgtaattgtcgttcattcgtcaccaacatgcgtgtattaacgcagattaagccttctgatagcggttgatccgctgcctgttctaaggcttgttcattgcggaaaattcctaattgcggaccaccccagaaaagttgatcagccatcacatcgtaaataatcccgaataaggcttgtccatcttcgtagaccccaatcataatcgcaaaattttcctgttgcttaacaaaattcattgtgccatcaattggatcaacgaaaaaagttagaccgttatgccaatcgccagcaccgacattggccccttcttctccgactaattgcgccattggatattccgctttgatttgttctgcgaaaaaggcttggttcgcgcagtcgacgttggtcactaaatcattacgacttgatttagtcataatttctaaaggttgtgtcatctttttgcgtgtttcagcggctgcttcaagtacccacttttgtaatgaacgacttaattgatatagcgcctcttgttccatcttttttcatctactttcaattattagtcgtcatcttaatttgtgcccggccactcttttgagcagtttgcatacaacggtagattgaataaccagaagcttccgtaaaagctttatcaagttgtttttcaatcatcttgcttcgaacgacttgtttaaaatcacggtaggccgcgtttaaatcttcaactttagcgccaaattcataagcttgttcaacaagattatataaatgcatgacttgaaccacttcttctggtgtccaatctgattctaaaggatagctatagttagtttgcataagtactcctaaatttaagtcaatttaagcaaaattgacgtttttaatatcaatcattatagcgcatttttttaggaactgtcgaatcgttttagcaagtgtatacaaaaagggccgtcacaattcatgacgaacccttcagtgttagatgtgaattggtaggcctaatgctaattcagcatcatccataattgcttcactcaatgttggatgtgggtgaattgttaaggctaaatcttccgcattcatccctgattcaattgctaaggttaattctgagatcaagtcgctagcaccaacgcctgctacttgtgcaccaagcaacgtattatcgtcagtattcgttactaagcgtacaaaaccgtcagtttcagccaacgacaacgcacgaccgttagcagcaaatgggaatttaaaacctttggcgttatagcctttttcttttgcttcagcaaccgttaaaccagtggttgccaattctggatcagtataacaaaccgctggcatcgctttgtagtccacaatcacttttttaccagcgattgcttcggcagcaattttagcttcataactggccttatgagccaacgcagcaccggaaacaatatcaccaatagcatagatgcctttgatattagtttgaccttgttgatcaacttcgattaaaccacgatcagccatcttgataccagcttgttccaagcccatatcatcagtattaggacgacgaccaacagttaccatgacataatcggcaaccaattgttcttccttgccgccaacttcgtatttaacagtcacgttttgatctgtttcgattgattctttagccatagcaccggtaatcacatcgacacccttagtcttgaagttcttcgttacaagttgcaccatgtctttttcgaagtttggcaaaattgaatccgttccttcaagaatggtgacgtgggcacccaagttagcgtaagcacctgctaattcagaaccgatgtaacccccgccaatcacaactaattccttaggcacttccgttaagtttaaaccaccagttgaatcaatcacgcgtttgttgaacttgaagcccttaatttcaattgggcgactaccagttgcgatgattaagttcttgaaactataagtttgtgcactttcttctttaatgacccgtaagctatgttcatcaactaaaaaggcagaaccgtctaagacatcaattttgtgttttttaaacaacattgaaatgccgcccgttaatttttcgacaacttggtgttgtttccagtcttgcgtctttgcaaaatcaagcgttgcacccgttgttgaaacaccgaaaacttcggaattcttagcttcttgcaaacgatgacctgcagagattaacgctttagaagggatacagccgacgttcaaacaaatcccaccgatattttcacgttcaataaccgttactttttgacccatttcagctgctcgaatggcagcaacgtagcccccaggtccagaaccaataacgacagtttctaattcaattgcaaaatcacctacaaccatttttaaatcatccttccatcaatagtagctctggatcagctaataattcttttaattcgttcatcgcacgttgcgcagtcccaccatcaattaaacggtgatcaaatgataatgataattttaagactttaccaactgcaagttcgccatcttcgttaacaattggttctgtgccgatacggccaacccctaggatagccacttcagggtagttaacaactggtgtaaaccaaccaccaccgattgatccgatgttactaatcgtcattgaaccgccactcatttcagcaggttttaacttattatctaaagctttttgcgtgttttcgccaatttccttagcgatggcaaagatactcttgctgtcggcatctttaatgtttggtacataaaggccgtgatcagtatcggttgcgatgccgacattaatgtagtgtttataaacaatttcgcttgttgtgtcgtcaattgaggcgttcaacgttgggaaatcacgtaaaacagttactaaagccttaacaatgtatggtaagaaggttaacttaatatctttcttagcagcaacatccttaaatttcttacgatgggtcattaatttagaaacttcaacttcatcaaataatgtcacgtgcggtgcaatatgcttgcttgtcaccattgctttagcaattgcttttcgtgttggtgacatcttttcacgtgtttcaagttctggtgttgctgattcataaggtttaacggctactgctggttcaggtgtcgctgtggttacaggggcactcttagtgtcagtggttgtcgttgaagcaactagtgcagtaccattttgcatgaagttttgaatatcttctttcgtcgtacgaccgtgtttaccagtcgctggcacttggctaatatccacgttattctcacgcgcaaactgacggacagatggcattgccaatactttccgatttggatcactaatggcaaccacgcttgtgtcactactattattagttgctactggtgtttctgccgcctgaggtgctggcgttgttgctacgggcgctgaagctgttgcagtattgtggcctggtgcatcaatctcaacaagcacttgcccgactgttgcaacttcgccttcaccgactaagattttaacaatcttaccgctaacaggtgatgggatttcttcaactgatttatcgttttggacttctaataaggtatcgtcttctgcaattgtatcgccttctgcgactgcccatttttggatttcgccttctgcaatcccttcaccaatatctggtaacttaaattgataaacaccttcactggctgctggcgctgcaggttgttctgctgctggcgtagttgtttctgctgttggtgcatcgttaccttcaactcctggtgcatcgatttcaacgaggacttgacccactgttgcaacttcgccttcacccactaagattttaacaatcttaccactaacaggtgatgggatttcttcaactgatttatcattttggacttctagtaatgtatcgtcttccgcaattgtatcgccttctgcgactgcccatttttggatttcgccttctgcaataccttcaccgatatctggtaatttaaattgatatgccatgcttatgtcgtcccttccttcgttatcgactaaaagttaataacttctttaactttattttcaatatcagttgcgtttggtaaccatgttgattcagcttgcccaaatgggaatggtgtatctggtgctgaaacgcgaccaattggtgcttctaatgaaaggacagcgcgttctgaaatttcagaagccacttgtgccccaacacccgcttgtttttgtgcttcttgcacaatgacaacgcgaccggttttttcaactgatgcaataatggttttaatatctaatggggcgatggtccgcaaatcgatgatttctactgaaatattatctttagctaaattttcagccgctttcttagcctcgcgaaccattgcgccgtaagtgatgattgaaacatctgaaccttccaatgtgacagcagctttatcaagtggcactgtgtaagattcgtctggcacttcctcacggaatgagcgataaagtttcatatgttccaaatataaaacaggatcatttgaacgaatcgccgcaatcaataagcctttagcgtcgtatggattgcttgggacaactactcgaatcccaggaatttgggtaatcataccctcaaagttatctgaatgcatttcaggagtatgcacaccgccaccaaatggtgcccggattgtaattggcatattacgtgtgccacccatccgataacgagtccgtgacatttgaccggcgattgaatctaatgtttcaaaaacaaaaccaaagaattgaatttccggaacgggtctaaaaccttccaaagctaacccgattgataaaccaccaatcccagattcagctaaaggtgtatcgaaaacgcgttcttcgccatgtttagcttgcaagccttcagtcgcacggaaaacaccaccatttttgccgacatcttccccgaaaattaagacattttcatcacttgctagttctaaatccagcgcatttgtaattgcttgaatcattgttttttgtgccatcttaattcgactcctttgcactgtattctgtgatttgttcttgaatattttgtggttgttcttcgaatgttacttttaagaagtcagttaccttttgtttaggaatagcatctgcttcattgattgcttctttaatagctgctttaacttgatcaattaattcattttcttgatcttctgaccagaggcccttattcgttaagaaacgacgcatcctaactagtggatcacgtttcaaccaaatatcatctgtttcttttgtccgataacgagttgggtcatccccggagagtgtatggggtccataacgataagttaaggtttcaattaaaacaggtccgttgccagcggttgtgaaatctctagcttctttcatgacttcataaacggctagtggatccatcccatctacttggatagcaggaatcccggcagcaacccccttttgggctaatgtcactgcggctgtttgtttttcacgaggaactgaaatagcaaaaccgttattttgaacaacgaagattgcaggggctttaaaagcaccagcaaagttaatgccttcatagaaatcaccctgtgaagtaccgccatcacccgtataaacataaacggcattcttggactgacgtttcttcatcccgacagcaacacccattgcttgaatgtattgtgccccgataataatttgtggtggcattgctttgagtgattctggatacttgttaccttcaatatgaccacgtgaccataagaaagcttgtgatagaggtaagccatgttgcaccaattgtggtacatcacgataaccagggaataagaaatcatccttgttcatcgcaaaattgcttgctaattgactcgcttcttgtccggcagttggtgcgtaaaaacctaaacggccttgacgatttaaggcagttgcacgttgatctaacacacgtgaccaaaccatctgtttcatcaattcaacaagttgttcatcacttagatctggcatgatatcaggatttacaacttggccagtttcatctagaatctgaactgttttaaaatcttggctttcatcgccgagtagtttatcaaaattaactgcagctttattattggccataatattcattctcctcttcactaaactgttttaatgtttgcttatatctgtatcaattaagcttcttcacaaatataatttagcattttacagcactaaatgcaagcgttttacataactaatcatcaaacaccttgcgcttatcgttttatgtatatgtgaatttagtcaccaactgattagcatccgctaaaagcttcctctgttatataatatatttaaattctgttatataataacaaccggatcaatgcacaaaaaaagcgctagtacaaaccatcgtctgtactaaacgcttgttaattatatttgttggggtacttcacgccaagaccggttggggaatttcagcgttcccagcatgtactaggaagcgttgaacatccgcccaaactggttcaactcttaaatgagtcattagacggtgaagattaactagtaggcgcatccgtaattgaccgatacttacaaaaacaagtaaatttttgaattgccctgtttttgtaacacgcatcatcataactgcagtacaaattgctaagccaattgtcacaccaacaaaagcaaattcgttgactgcaaggaccgcaaagaatgatacaagtgctgccactgccattaagaaggcatttcctaggcgaaccttagcgatatcatccttaggtgatagtgtttcattcaacacgacacctctggtaccagttttaacaactgtaccagctttgatgaccgccatttctttatcaattgtcgctacggcaactggtgctttttctgtcgcatttaatactaagatgtcacctgctacaatttgatcaacaccaatttcacgtagaaaaccatcacgcacaacacttgccatctgatttgaatcggcaactaacgatgcgcgttttgcagcttcaatcgttgttaacccgcttggacgagttgccaacaaacgcattaacattccgctgcttgtgattgcgtttaatgttgtttcttgctttaaattcttgtgcatcgcgttcgacactccttcccttttgaggaagtcgtcgtaacactgctagcctaatgctggcagtaaaaagacagaccacctcggatgatcactatcgctactacttaacggaccttcagctgtttgcaacattttactcaccagactttctaattaattttagagatcgcacttagttgtacaaaaaaagacgcacaacaattgagcgtcatccataacatcatggcgttcccaatcgttcagttttagcactatatgacgtagaaaccatgttcagctacgttagaaaaagccttcattggcagtttttgttgactcaattggcatctctcgatgtttctgagtagcagcgtatgttcatataggagcctcacctaacggaaaagcgatatctctatatacccattctactggttatcaataggtgggtcaacccatttgttccgttttttttaattctgtgctagaataacctatgatgaattaatcggaggtcttaactgtgatattaatgaaagatattatccgcgaaggtaatcctacacttagagaaattgcacaacctgtttcattcccattatctgacgaagatcggcaacttgccgctgacatgatgacattcttggaaaatagccaagatccagaaattgctgcgaaatatcaattacgcgccggtgttggtttagccgctccacaagtcgatgtttcaaaacaaatgtcagccgttttagtcccaggccctgaaggcgaagccccaatcttgaaggacgtaattattaatcctaagattattagccactctgttcaagacgctgctttagccgaaggtgaaggttgcctatcagtcgaccgcgaagtccccggttatgtgccccggcacgacagaattacattacgttatcaagacgttgaaggtgttagtcataagattcgtcttaaaaactatcccgcaattgtttgccaacacgaaatcgatcatttaaacggtattcttttctttgaccacatcaacaaagaaaatccatttgccgcaccggatgatatgattattcttgaataatgaactaacgaaaaaaggttaagccccaaattgggcttaaccttttttctatgcatttaattttgcttctgcaaattgactgttataaagcttagcataaacaccattagcggctaataagtcatcatgcgttcctttttcaacaatttgaccgtgatccatcactaaaattaagttagcatcccgaattgttgataagcgatgggcaatcacaaagcttgttcgtccttgcatcactttttccatcgccttttgtaataagctttctaagcgcgtatcgactgaactggttgcttcatctaaaatcaaaattttaggattagcaatcactgcccgagcaatcgttaagagttgcttttgtcctaacgacacgttatccgcttcttcatcaattgtcatctgatagccatttggcaatgtatggataaagtgatcaacattagccgttttggcagcatccacgacttcatattcagtggcatctagcttcccaaaacgaatattttccgtaatcgttgtgtggtacaaccaagcatcctgcagcaccatcccaaagagtgagcgaactgtctgtttactcaattggcgggtatcgacgccatcaatcaggatttgaccagaactgacatcgtaaaaacgcattaataaattaatcatcgtcgttttcccggccccagttggcccaacaatcgcaattttatcgcccggattagcagtgaaacttaaatcacgaatcaacggtttggctggatcatagctaaagctgacatctttaaattcaactttcccctgaacatcagccggtaattcagccgtttcttgatcagttggttcaatcggttcatctaagatttcaaaaactcgttgtgtcgcagcggcagcggcttgcatcacaccggataattgtgtgatttgcgaaatcggttgattaatctgccaaatatattgaataaaggcctgcaagttaccaaccgtaatgacaccgtgcaagacatagtaaccacccaaggttgccatcccagcgtaagtcaagttagtcgtcaaacccactaatggcatcataatccctgaaataaaggccgctttgaagccaaattcagtcaatcgatccgtaatcgctgcaaattcatcaactgctcgttcttcttgaccatacaacttcaagacactgaagccaccatagttttcttgaacatagccgttcatctcacccaaggtattttgttgcccttggaagtaaacttgtgactttttgatgattgctttagaaatcaaaagtgaggtcggaatcataattaaggatagtaatgccatccataaattaatcgtcaacatcatgacaaccgccatgatgatccccaaaattgaggtcaccacttggattaaactctgttgcaaggcattggtaattgcatcaacatcattagtaacccgcgacaagatattgccttgttgttgtgaatcaaagaaacggactggcaaagcgttcatctgtagattgatatcccgccgtaaatcacgcattgcgtgttggacggcacgcgtcattaaaaacgatcccagaaacatcatcgtttgataaagtaatgcaaagctgagaatcatcgcaatcactttagtaatgtaactaaagttaacggcgacgtgttgcgctaagttttgactaatttcagtcactgctagtcccatgataaatggccatagcgcattcgctaaaacggaaatcaccgttgcagtaattgctgaccagaacgttattttatacggcccaatatagcgcatcaggcgtttgagcaccttaatattcttcattgagctcctcctttgataactgtgaggcggcaatggcccgataaacctcatttgttttaagtaattccttgtgggtcccgatgcccacaacttggccttcatttaagacgacaattcgatccgcattcataatcgtccctacacgttgggcgacaattaagaccgtcgcatctttcgtaatcgattttaaagcgccccgtaaagccgcatcagtttgataatccaaagctgagaagctatcgtcaaagacgtaaatgtctggccgacgaacaattgctctggcaatcgctagccgttgcttttgcccacctgataagttgttgcccccttcggccaaatacgtttggagtccctctggtttttccgccacaaatgttttggattgggcaatcgttaaagcatcccataattcagcatccgttgcttccggattaccatagcgcaagttatccgcaatcgtgccggtaaagaggactgctttttgaggaataaaaccaattttttggcgtaatgctttcaattgataatcacgaacatcgtaaccatcaatcatcacttgaccccgtgtcacatcgaaaaagcgtggaatcaattggattaaggttgatttaccactccccgtactaccgatgaaggcgacggtttcccctggatgggctttaaaactgacatcccgaatgaccggactttctgtcggaccaggataagcaaacgacacattttcaaaagccaattcgccttgggtagtcgtggtttgaatcccttggtcatcatccgtaatatctacgggtgaattaaggactttttcaatccgttctgctgaaacagccgctctagggtacatcatgaagacacttgcgaagagcatgaatgaaaatagtacgtggaaaatgtattcaataaaggcaattaacgtccccactgccaagtgacccgtgttaatttgaaccgccccttgccaaatgattaacacgaacacaatattgaagataaatgaaaagccaggttgtgcgagggctactaatgtaaagagtttgattgaactctgactgtaggcttcattaacttttctaaaacgcatactctggaatttttcacgcacaaatgcgcgaataacacgaatcccagttaaattttcacgtaagtttaaattgattgcatctaagtttttttgttgttctgcagacattggttcggataaccaaccaatgatgaccaccccaactaataaaatcggaatggctgcaaaaacaatccatgataacgacagactcgtccgcacaatcataaacgcactggcaacgatcatcatcggggtcataaacccagttcgtaacacttgcaccatgaattgcgtcacttgaaacgcatcgttggtcgtccgagtaattaaggaagacacgccaaattcaccatattcatgatgtgaaaattgcatcgtatttttaaaaatatcgttccggatatcacgtgttaaattagtggttaagcgactccccgtgtaggctaggccaattaaccccaccaagccaattaaggaaataacaaccattaaagtcccatattgccaaaccggcccgaccgtatggcggttgatacctttatcaataatttgtcctaataaagttggtaatcctagttcaattaaaataaacccaaatacgcaaataaaattccaaaatagtagttttttatagcgaatggtatagcgccacattaatttcataggtgctaactccttcttgtttcaaatttagtccatcacacgtgccatatccttgacgtattcaatcgtttcccgattgacaataaacgccacatcaaaatggtactcctggtccaataaccaagcatccgtaatcactaacgctggatatttaggattaacggaggcaattcgtcgctcatctgcaacctcatttaaagtctgcgctaacgtttctgtaatcggttttaacgacacatccgtttgtaaaacatttacgcgatactcaaacaacatcacattcccgccccaaacttctgttggtaaattggcagtcaaagttgcttgtttcgtataaaattgcggttggacgctcaataatctttgatacgcaatattgacaatctcgtctaccgtttcttgactactactttgtaaaatccgcatggctctttgtcgacgaatacgatgaatgaaccaagctagaccgcccaccaatccaattaagactagtagtaataaccaaatcaacatggcaaccccctctttctatttgtaacggttgtcataattataaccgaattagagtaaactcgctattacgaggccattgctcaatgtatactttaaacaaaagatatgctaaaatattcttaaatgttgagtaatcaacctctggacggttaaactttcgtttaaaaataagatgaatatcaaaggagttttacaattgatttataaagtacttttccaagcagacaaaacacaaagccctctacgcgaggcaactaaatccctctatcttgaagctaacagtgccgttgaagcacgtcaacttgttgaagacaatacaccctacaatattgaatttgtacaagagcttactggtgaacacttagcttacgaacaagaatcagaagacttcaaattaacggagttctaaataaatgaaactcaatataaaaaacaatgaaacagccgtttttgccgtagggggtcttggcgaaattggtaagaacatgtacggtgttcaattccaagatgaaattatcgttattgacgccggcatcaagtttccagaagatgaattattagggattgactatgtcatttccgattatcaatatcttcaaaagaaccaacaaaaaatcaaagcccttgtgattactcatggtcatgaagatcatattggtgggttacctttctttttacaacaagtgccaaacgttcctgtttatgcaggtcctttagctcttgctttaattcgcggtaagttagaagaacatggccttttgcggtctactgaattacatgaaataaacgaagataccgtccttaaattccgcaaaaccagtgttgatttcttccggacaacccattcaattcctgatacattaggggttgcgattcatacacctcaaggggtcgttgttgaaactggtgatttcaagtttgacttaacaccagttggtaatcaaccttcccctaaccttcaaaagatggcacgtcttggcgaagaaggcgttctttgcttaatgtctgatagtaccaatgctgaagtgcctaacttcacgaaatcagaacgttttgttggcgattcaatccgccacattgtggaacggattgaaggccggattatcttcgcaactttcgcttctaatatttcacgggtctcacaagcaaccgatgcagcgattgctaacggtcgaaagattgcggtcttcggacgtagcatggaagctgccgttgttaatggtcgtgaattaggttatttaaatattcctgatgaagcactggttgatgcaagtcaacttaactcattacctgctgataaagtgatgattatctgtacgggttctcaaggcgaaccaatggccgctttgagccggattgctaacggtactcaccgtcagatttcaatccaacctggcgatacagttgttttctcaagtaatccaattcctgggaatacaacgagcgttaaccacgttatcaataagctttctgaagcaggcgctgaagttattcatggtaaggtcaacaacattcatacttctggtcatggtggccaagaagaacaaaaattaatgttgcgtttaatgaaacctaagttcttcatgccttgtcatggtgaataccggatgcaaaagattcataccgaactcgcccaacaatgtggcgttgaaccggataattgtttcatccttgaaaatggtgatgtcttagccttaaccgctgactcagcacatgttgctggccatttcagtgccgacgatgtttatgtagatggtaacgggattggtgatatcggtaacgttgtccttcgcgatcgtaaaatgctttctgaagaaggcttggtcgtggttgtcgcaacgattaacttcggtgagaaaaacattcttgccggtcctgatatcctttcacgggggtttgtctatatgcgtgaatctggtgaattgatcagcgaagcccaacgacgggttttcagaatgatcgtcaacacgttcaatgctaacgacaaggtcactgaaaaccaagtccgagaagcaatcatcgatggccttcaagatttcttatttgaaaagacggaacgccatccgatgattttaccaatgatcattcaaagtaatgaataaaacctttaagggcgatacaaactcacgtttgtatcgcccttttttttaattcttatcaaaaatttaggtagtaaaacttgtcatttcccgctataatatacaccgaatatcttttctgaaagggggtatccgaatggctgatacgccacatttttatattattttaaatcaagttgctggtactggccaagctcagaagatttggccgcaaatcgaaactgccctcaagcaacgcggtatttcatatgaattacaaatttctagctatcccggtcataccactcggattgcctaccaatttgcccgttttaaacgaacgaatcaagttttgttgattgtcggcggtgatggtactttaaaccaagccattaatggggtccaaagtgccggtaaacatgatatccccatcgcatatttaccttgtggctctggtaatgatttcgcgcgtggaattggcttaaatagcgatccactacaagcgctcgaacagattcttgcagctaccgcccccgtcaatatcgatttgggtgtctatcacgatgctctcaagaacgagactggttatttcgtcaacaatgtcggtattggttttgacgcttccgtcgtcagtatcactaacaactctaaaagcaaacgcttcttaaataaatgccatctcggctccttatcttacgtcttctcgctaatccaggcctttacatcgcaagatgctttccaagtgaccgtcaaggccaacggatccgttaaaaactttagccgtggttttcttgtcacaaccacgaatcatccttactttggcagtggtgttcccatcatgccttctgcccgcgtcgatgatcaaaaactcgacctcgtggtgattgaaaagttgaacgttttcttcttctgctacctattcatcatgatgctaatgggcaaacacacccgctataagacggttcatcattttagaactgatgatcttgtcattcgaacccaaacgttagaatttggccaagtcgatggcgaagaaatgggtagtcgcgcatttgatatgcacttcaaggtcacatcccaacccttctggctaacaacaactaaaacagaacaattcaaataagcttttacaaattaaagaagaacaacgccatttaacgttgttcttcttttttattacctataaaaatcgtggtttcctttaatttaagccaggataacccagcaattaggctgcccgaaatggcgccgccaaaaaagcgtggtgtgtaaacgaaccaaaataaaccactagcactaccggtaaaccaaatcataacgggataagaaagtaacgagccgattaaacccgttcctaaaatttcgcctgcaattgcccagccaatatgcccgccatagcgataaccaaggccagctaataaagcgccaaaaaaagcccccgttaaggctaaaggtggaatccccagtaacatcattcttaaaacggccgtcactaacgccatcacggttgcataaattggccccatcaacactgccgctgtaacgttcagaacactcgacatcggtgccatgccttcaatgcgaaataacggcgataagacgacatctagtgcaatcatcatcgcaaggatggttaatcgtttcgttcgtctattattcatcgtattcgtccccacgcaaccattgttccttacgataagccatctcccaaaaatgatattccaattggctgctacgaacaaacgcctgcaccattttaacctgatcttccgctgaactggctgcatacaagcgatttaaaacagtgcccatcatttgaatttcatcctgcaattcagccatcgtgtaggtttcaatccagcgttgataatatggattaggtgaagccggctgttgacttaaagccattccgatatcaccgtataaccaagcacatgggtataaaccagccgccgcgatggcggggttatccgcaaataattgccgatacatatgagcaacatagtgatcagttgtcggcgcaatgggtgtcgctcgaacctcagcagccgttatttttaaagcttcaaagaattgttcccgaacgatcatttcaccatctttcaaaccagttgcgcttagtatcatcaacgcttttaattcttgatcctgacagtgatcggcgacgatttgatgtaactttctgaaatgacgaagataataatgatcttgaatcaaataataccgaaatatttcttctggcagcgtccccgcttgcaattgaacgataaacggatgacgtaaactaccttgccaatatggtgcagcttctttacgaacaatacttgtaaatgacatgttgcccctcctgtacgaattgaaatcaattcacttctggggccacttgacaagcactcaaaatacccgccaattaaaaattgacgggtaccaaaataagcacgtttaatcaacaaacgacacgacatttccctgcgctagtcctaactatatcaggttcaatgggtataatctcagctcttaggcaccccagatgcgttattcaattatggcttcattatagcacggatggaagcggttattcactaaaatcatcatcaagtgactcagtctactgatgattgctctttctccataacaaagttggtcaataaaacaccttgccgtgctacttgttgttctcgaatcacctgatagccccgactttcgaaaaacggtctggctgtaatcgaagcatgcgtgataactcggcctgcaacagcctgctcgagctgatgacagatagcagtcgctacgcctcttctttgataatcggcatggacaaataaccgatcgaggtagccagcttgatcaatatctccaaaaccaatcaggttatcattttcaagtgcaacaacactgaaatgtgattacagcgattgatcccactgctttaaatcaggctcaccagtggcccatacagccaactgcgctttcgtataatcgccagcattcactgtatgcactgtcttataaaacaactctgcgactgcttgacaatcccccggctgatagcgtctaatctccaattatttagtccctctttaatctttttcttcatgtctaattgtaatcgtcatttgtttctcctagtaataattcttttaatttttaaaaaatatctggcttatcggtaaagataagccctcacctcattgaagtttaaaatagggttgaaattccgccggcacttcatcttgtgaaacccattgattggggagctcggccgctgcacttggctgcttgcttgcagtgattaaataacgataatcaatgtgcatgtgggctgcttgctttttcaatgggttatccggaatcttgatcaaattggcatccaccaattgtgcttgctccccgactagtcctgtttcctccaataactcgcgtagtgctgtttgaactggcgtttcagacagttcaacatgtcccgccggtaacaaccattgatgcaagtacggatggcgtaccatcaacaactgattatttttaaatacgagggcactagccgataaatgacattgatcgttgaccgcccgataaaggggccgtttttgttgggccatcaattcactaatcgtctgatacttttgcggatcattaaacgctgctgactgctcagctagccgctgaatttgcgttaacaaatcgttcatgagcgcgccgccattaacaggtctgcttgctgatagcctttgaacaagttaatcattttatgcgttgctaaaacatcgtgcacacgcagaatacgggctccctgttcaatcatcagttgttccaataacagcgttgaggttaagcgttctgccatcggataatcaaatttgctttccataaagcttttccgagaaatccccgccatgattgacgcacgatacttcattgtcggttgaatgctattgagtttaaacagatccagtgacgctgtatttttagcgtgtgaaaaaccaacgcctggatccaaagcaatttgttggcgtgttaacccggccgcctcaagactcgctaacgtctcttggtaaaattgatcgagtatttcaaaaacatcattttgataatggcggccattatacatcgtgaccactgcgggccggtgttgggcgacaacttcgagcttagccggtttatcgaaaccatcgatatcattcagaattggcacgccgcttgcgactgcccgttgcataacatccgcattattggtatcaactgccaatatcgcgttgggccattcctgttgcactgccgcaatcacgggtgcaatccgttgccattcttcatcaggcgtaatttcttgataacctgggcgcgtcgatttgccaccgacttcaatcaccgctgcaccattggccaaatcagcctcaattttcgtcataatctggcctagcgcttgactgggttgcccatcataaaaggaatccggtgtacagttaataatcgcgtagacaattggatcaaccgttaaatcgaacttgaaaccaggaccggtccataaaatctgcttggtacgccagatttgtgtcaattgcacatttggctgaccaaaatattgtgcccatttttgccgtaacgccgctagttgaaaaagactaaattgcccaagccattgttggtccaactgctgaattagacaatgactatctagacaaagccgttgaagcttctcgatttcagctgcatccccactaaagcttaacagcgtatgatttccttgattaggttgtgcttcgctaatttgcatatgatcctccctagctcaaaaagtgttgccgaactgtctttaataaataaaatgaccctacaactaagatgacttgcggtttattccccgttgcaggttgactagccgcccttaaagccgcttcaattgctggatattcaggtgctgtttggcctgttatctgcgtgtatagcgcccctaattcagcaactggtaattgtcggtcatcctgattgatgggggtcgttaaaataaaccgcgctggtagttgcgttaaaagctgcaagcattcagcaaccgccttatcttttaaaaagccagttacaatcgttaaatcgtaatcgccgtagcgttcttggacactccggacaaactgccgaatgccatccggattatgggcaccatcaatcacgactagcggttccgttgccaggcgctcaaagcggcctggtaagcggacctgccccaaagcacgttgtaagacgatttcgtctaccgcgtgcccttgatcacgacaaaactgccgataccacgtcaataccgttagcaggttctctaattgataggtccccgccaatgccaaagaaaccgttaatggttcacgctctggtaatttaaccgtcacttcttggccagcactggttggataacttgtcacgaaccaatcacgaggggcaatctgaagcggtgctgattgccgcttagcttcagcctctaaaacgtttaaggctattgtcgtttgttcagaggccacaataaccggggtctgtggccggataattttggatttagtcgtagcgattgcttcaatcgtatcgcccaatagtgccatatgatcgagactgatcttcgtaaatagcgtgtaggccactcgatcaaccgcattggttgcatctaactcgccacccaagccacattcccacaggacataatcgacttgttgctgcttaaaatagaccaacgccactaataccaaagtttcaaaatacgataagtccgtcgtcggatcaaagccgagttttttcaaaacggtttggaccgtcgccaataatcgctcaaactgcgcttttgaaatcaactgccggttaatctgaatactttcctcgactgccatgatgtgcggactcgtaaataaccccacggagtagccggatgcttgcagaattgccgcaatcatcgcactcgttgagcccttgccattcgttccgcacacatgaataatcgaaaaagcatgatctggttgccccatcgcttttaaaatctggcgcaagagcgtcacccgttcgtcttcaccatataacatccttggtaattgcgtgaccatttcctcatcttgcatactaaaatcccctatttcaatagttgtagaaattcactgcgtaattggcggtcagttttaaaattgccgctgtaaaaagtcgtatgggtctgactattggccttcttaatgccgcgcatctcaacacacatatggcgcgccgtcacttgaaccgcaaccccatatggctttaatatttgattcaaaatttggccgatatcacgcgttaaattctcctgaacactcaatctttttgaaacgaaatccactaaccggggaattttactcaagccgataatctggccgtttgctggtaaataggccacgctaacctgaccaaaaaaaggcaacatatgatgctcacacattgaataaaacggaatgtcttgcatcatcaccatctgatcattgtcggtctcttcagtttcgaataacttatagtccttaaaaatggtttccccctgataggccaaaacttctccgtacattttagcgactcgttgtggggtttctaacacgccagcacgctcaggatcatcgccaacttgcttcaaaatatcgcgtacatctttttcaatttgctgatttgtttgttctgtcatcgtttacctcttctattcgtttaatcgtctgggtttgatcctgcttcaagacatcaatctggatttcaatcgcagctttttgataaaagtcggccccacagatttctaagattggcactaacacaaataaccgcttgaaggcttctggatggggaattactaacgtatcactttgtaagaccagctcattaaagaaaataatatctaggtccaaagtccgcggtccccagtgaattgttcgttcccgccgacacgcctgctcaatttgatgtaagacaaccaacaactgatccggcgtataatcggtactaatttttaaagcgccgttgataaaatcggcctgttcaactggacccaccggcgcggtttggtaaaaggctgaccggcgttcaatttgaattttcgaatcgactgtcaaaagggctagcgcctggttaatattcgcctttaaatcacccatattactgccgtaactaatataaacttgattgctcaaactcaaccctccatctcgatttcgacatggtcaaaaataccttcaattggcaccgcaatcttgcgcaccttaaccgcaactaagccaatccgatcaggatcaagggcgtgaattgcctggataatctcatgagcgattgtttcgaccaaattagcgcgtgatttggcgattaattgggcaatcacttcataaaaatcagcataactgaccgtatccgttaattcgtctccttgataaggcgtcataattgccacctttaaatcaatttcaatacgctgacctagatccttctcagcttgaaaaacaccaatatgcgaatgaaactgcatattattaattttaatatgatacatcagaccgcctcctaataaccgttcatttgctaatattttatcacaaatatacgtaattcgttcggatatcgacgctaaatatttaaattatctaaattcagttcacaattttcatcattttatcacaattcgtaaagttgatattattaaataaaaccgcataaaatgatgtcgatctctcatcattatatatcagcgcatttccccaataaaaaaatactgcctaaccgaaagggttaaacagcattcatatctttaaaaatgactaaaaaggacattattaatcacttaattgacttcgagaaccatttaatttaatctattaataaactgaaagtaggtcataaaatgttatcgaatcaattagcaaccacctcagactatgcgctagtcctcgatatttgggaacagtccgttttagcgacgcataatttcttacaacctgaagacgtaaccttttataaaacacaaatcccccaattcctggatcaaacggttctcagaatctggtcactagataaccaacctattggttttagtggtaccaacggtcaagaattagagatgctatttctcgaccctcattacattggtggcgggtatggccatcaaatcttagactggctaatcaataatcaacggattaataaaattgatgtaaacgaacaaaatcaacgtgccaaagcgttctacttaaagcacggttttacagttgtatcacggagtcagcgagatggctttgataaaccatatccgattttacatttgacaagataaatagctttctacaaaagaagccacactatccattagatagcgtggcttcttttaattagaccgttctacattgcagtgccacgttctgaccaccaaccattaaacagccgcaaccgaccatttctgccagctgggcgtccaattgaaccatcacatcatgaattgttcttagatccgcacgtggttcgtgacgacaaataaacaacggtaaatcgttacgcgtgtaataataactcatctgtcccacaataccaacgcctactttagacaacatgacgttcccagtctcatttaacgttaaagaatactgatcattaatccgtgctggttcaaattgtttcattcaactcgctcctgacattttattactgctaatatcttacaacagaaaaaaattaaataacattcttgacatgcatcttaatcacactagatttctaaaatcgctccaataaacattgtgagcaattacattgtcccgacttcttgaagatgttatttttaagttaaagaaggaggtgttgaatatgaagactttagacaatatcgctcttgccttattaatcgtaggcggtttaaactggctacttgttggtttatttaaattcgaccttgtggctatgctatttggcggccaagcagctattatttcacgaattgtttatgtcctagttggactaagtgcgctctactgtattaaattatttgctaatatcaataacatggcacgttaataacatgaaaaaagccctcatttgagggctttttttgatggctatattttaaaagttttaggtcactagccttaggtaaagtaaataagaaaaaaactaacgcgtgaggttcattctattgtatttaggctttttaaattacttaaattaagatcgtacttgcagatgagtagccgtaaatcattctgcgaattctgcacagaacaaaagatggtcttaaaatgttatcgcattgacggccaatacagttacccgttgaggtcgtcgccaaaaatatgactgttctagaagacctcattaacgaaacaatgcaatttgaaacctcatcgacacatattgcattctcggtagccaatgatgtgctggtgtaatacaagaaaatcgatttctattctttgcattcaacttattttgaaagtcatttaattaaatctaagaataaatagacgatagattaacaaaattgactaaacgaacaaaaaaaatgcgtcaaagtgttcacttaacttataattttagctttacacttgtatcataaaatgaaaaggatattttaagaaaattttatattcagaagaaaaataaaactatatagaaatatccattcactattgtaatagttaaaaagaatcttcacatattatttatataaatttactttactaagcaactataaaattctcttcccataaactctatattctccatcttcttcatggattctattaatataatttctatctaaatacgtatctaaaattagtttgtttattttattaacttcaaatttaggtcttttccccttgagtacattaataaactcaataggaaagtctaactttttaatgaaaactaacagttcattaaaagtcatcatttcaacattgacagcaaataacaacttcttattttcagtttgctcatctaataatagtcgtaccaataatgccttatctactacatactcattttcaatgattatatttatattctctaaagctctatcatatatagcctgttgtaatttcgtatttacgttagcgtatgaacttattaactcaggtaaatcactttctttgaacttatgctgaactatataagccttaatatccttaggatagctactatttaaaattgatatattttcctttgaagtatcaattaaccctttcttttctttttcagttaggttttcatttgctattaatttaattaataccgattgattgtaacaatcctcttgaccaaaaacatctataaaagtattcatatcacgttttacaaacgcgtatacgacctcctcatattttttcataatagctacaatatttggcatagtaacttctattattccggctagaattagttcttttattttctctatctggataccttctttattaaatccatccttatatactaattcaaaagatttcaaaatcgatatatatttatgcgtatctatactattcttaataaccaggttatcgtagagacttgataatatttcttcggcatatctacctttaatcgtttgaaaatttaattcaatattattcgtatttattttatcaacaagactatcattcacttgattttcactaagaagaaaatattcaataatattctcttcgctaactaagatatttcctgagtcaaatagcatttttctctgtgacaaatcttttacagagttaatctcatttatttttttaggtaattctaatcgatcaataacaccactgctattttcactagataaactaggattattcattaattccactattatttctggagtttcacgtaataattcgttagataaacttaaatatagattaatgtattcatttaattgattttcatatatgtttaccttaagaatttcttctgataataatagagatatattatcagaataaaatcttttgttaatatccagttcataaaccataaaagcatttttcagattattttctgaaagttgaaacatatttagttctactatttttttcgtttgaatttttgttgcatttatttccatgaattttatatttaatttacttaacctttttaaatagtcctctgaaggtatatcacttacttttaaatattcttcaaaatcactagattgctcaataaaatctttaatcttaattgttgaatcattatccttaacactcgaatcagaaaaatagaatatagcaatataaataaattcctctatttttaatcttttttctaaatttaatgaaattaaatctttaagaactaaattccacttagactccaatattccgaagaagttcaaaagtttcttttcctctttaaatcgttcatagatatctagtatatatacactagattcactatttctaataacattaaatatcgctgtaacctcggagtcatatttatccatattttcaatataaaatatagataagtctaaattcaatactttaaatctaattaattcttcaactgataattcagtcgttattctgtcaaaattagttagactataagtccattccttcggtcttctatcatagattcctcttaaaaattctttgtcctcaatatttaagttaacttaaaatactcgactggcaaacaccgtatcaggttatgctgacaaatttgtccaaaaattcggattaaatttgcaatctaccgtataataaaaataaaatttataaggatggattaaacatggtagatttagcgtatgatcatttcggaatcactcgtaaaataacagaattggaagctgatatgcctaagaattggctcagcttcgtgaattctaataaaaacttgaactatatggagaagtttggtgtagtggctattttacaagcattacagtcttatggggggccaactaaagctgctcttgtcaaagaaaaggctgttgaatatccttattttacagatgcagatagagagaaaaagtctagtaatggtcaaagtcagttaaattttagattgcagtggtctatgtctaatttaaagaaagccggattactttattcaccacagtggggagtatgggccttgacacagatgggagaagacgttgatataaataattttgatgtatgggacgatgtatactcaatatctactcctgtttggcaaaaaaagaagctaaataatcaaaaaaagaaagatgaaatactatcatcttcaaatgtcaatattgccaatctggacgaagacattgtagaagaaacagatgattctgaattatggcgagatcaattattacagcgattgagtgaaatgaatccatataagtttgaagaattgattgtaaatcttatgcgaaaaataggcattaaaatggataccacttcaaaaacaggagatagtggcattgatggcataggttatttaagaacccctgagttgatgacatataaaattgtgttacaaactaagcgatttacaaaaggtccggttacaggaccagatatcagtaattttgctggtaccattagtggtcataatgcagacagagggatatttgtaacgacttctacctatacaaatgatgctgtcagtagatcgcgtcaaggagctaatttaattaccttagttgatggtaatgaattagtagatttattatttgaatatagagtgggcattagcgaaaaaacagtcgttgttatcaatgaaaaaatatttccaaaagattaatatacagtctgcactggtttgagataaagagtgttagctttacccgttttttggtcgtggataaacgtattttgcttaatcgtaccatcggcgttaaagacatcaacctttttcagctgcatgacatcactgacccgtagtaaggtcgctttacccagttgaaaaatggtgtaattacgccgaccagctcgaaaactatccaacggcgtctcctggacacttgttaggacgttagaatctttgattggtaaaacaagttattgcaccataacctagtcacctcttttttaagcattagaatccaaccattataggcgttattttaagtataatctaaaaaacagcccctaacaaaccaagctgatttgttaggggctgttttatcggtcttttcaaggggtcattgtatataatagcccctatacaaacatattttgcaagtagccttttttctgttctttcaacaaatccaacttacgttgatgaagagcgatagtgtcatctaaatgtttgaagttggttagaccatcaacaacgtctcagtcttgcatcctcagtttcgaaattatatttgcagcgatctcctcaatggtggttaagtcaacaacaaaccattcacgcggatggattaagcgcccgttagcagccgtgatatcaatatctaactgatactcagccattgcatgatgcagcgccgtttcaagtgactccgcattcaggttcacaactttcatttcctcgaccaactcaactggcgcatataaataggtggattcgttctcggcgttcgcaatacgcttctgtattgatccagccgtaaacccaactttatacagtgggtgttcgttttggattcgcataatctgctcattggtgctcaaagatttgagcacgtaaataaagccggtaatttggtcattagtttcaaatgcaaaggtttcatctggttcggttacaactcgcccttgacgaccgtacaatgaagcggccaggccattccgtagtggatgattgtcggtgccattatcgtaaaccacatgtaatcttgcgtctgcctttcgattactgttgtcgttaagctcgatttccgcgccaacttcgtcaacgtagagcagttgacctttcaacacgtaaaaatgatggcgtagaatttcgtagtttttgaaaggccgtagctggcgcttaccggatgcaatctcagcttgagccttcttaaacattggttcaaattcaccaaaattcgccattgcctttcgttgcgatactacctctggtctattctcctgttcacgctgaatatccttgtaaaccttagtatcaaacaacttgctgtctgaaacttgtgtttgcgtacccataaataggacagaatcatcattcaaaatgtcatcaagtgaggaaaaatcagtcttctcctgcttgatcacgtcttccagtttttctgtctccggttcgtcacgtaataagccaaacgtatcatacgtggcaagatggtcccgacgttcagcactttcgcgaatacccttcaaccgactagcaagcttgcgctgcttcatctgggacgggtcacggagcttctgaggttcctgaccatcatggtcacttacccactcattgatttcctgaaagcccgtcacttcaagatcatacgtcaccgacttgtgcttaaccggagcttgcaacatatcatcaacatcaggatcattgaaaatatcatccagtgatctgattaagctatcgtccgccattctgcgccctccttgcctttaggtcttgtagctgggctaaggcataggccatcttaacttccagtttgtcttttgagttcttgtctggtttgcgcccattttcggcaacaaatcgcttagattcgttgtataagtacaccaattcggactcatcaaaattaaacttcttcgcatcaatcgagcgctgaataacacgcaacacatcgctatcaatattacgagacagcacgtcgtacgctctctgaaatggattgattgaatcaatcagattaatatccaagtcattcacgttgatgaacttatctgccatgcgcaagaattcgttcgtattccccttactatccgtcgtggtatccaccactgcatgtcgaagcacagtatcggccacggcatattggcgtacttcttcaacttcctcattattcaagtttggataccgctgcataatcaccttgggaatcagaatcttattcatggtctcaggatcaacgcttgccgcaataccgttcttgaccgcatcatcttgcaaaattgcggccttcaaatcaggcatgtcattctcaatgatgctcttaacatgcttagttgacggatctttcaacccccggacaaaaatatcaccgccgttgctcgacgacttatctttcttatgtttacgcgctttaagatgaatctccggggccaggacttgttccatcaacaacgatgctgtaattgctttcaggattgaattgaccgcatactgaacctcgccatctttagcatcaggctgttcaatcatattggtaaattgcgcatgcgtcttatttgaactatcacgggtgactcggccaataatctgcacgatttccgtcaaagatcgacgataaccaatggtcaacgcttgttcagcccacggccaatcaaagccttccttagccatcccaagggcaatcaaaatgtctaaatcgtccgcgctattgacctgctcacgcagataatcctgaatacggtcacgcccctcttcggtcaccaaatcagcaacccttagcatccggttgtcaaccttactcctaattgagtaaatccctgtcgtctgatcctgatcaacgacttcaccaattgcatcaaaaatcgcatctacttcgttaagcttgtccttggttgattcacttgagttcacactgggaatgtgaataatcgtcttcttagtcacatcgagcgcttgatccagtgcggacaaatacgccccctgataaaacttgtagtcaatgccaaacgactttagatacttgtagccgtccagttgctcgtagtaggtgtaattgaccttatcaaactgctgctcatcttctggcgataaaattggcgcggaatccccgcggaaataagaccccgtcattgctagaatatgtgcggtggagttatgcgtaatatttttcaaagccgatccaagcaccgaactgtcatcagacgaaacatgatggaattcatcaattgccaacatcacgttatcaaatttatgatcatcatcaatcttgtcgtaagcaaagcgcaatgtcgcatgagtacaaaccagaatccgaccactaggatctttaagaaagtccagtagcttttgcactttgctttcctggccaccatttaatgttagatcatattgtggatcaacttgccagtcctcatagaaaccgaacttcactaagtccgtattcttaaatgaacgaccgattgaccgttcagggacagccacaataacctttttgactccttggttagccaacttatctaatgctacaaacatcaacgcacgggatttaccagaagccggtggggccttaactaaaatgtattttgattttcgatgttgataaacacgggcctgcatttcccgcattcctaattcattggtattagtacttttaccagtttgatggtaattgacctccactacatttttatcttgcatttacttttcctcgttaactttcttagtatacatatccagtaataatgccaagcgttcattgtcatccttaaatggacgatcacgataagcccgatcaaccacttggtcgagttcttcatgagcagcctttagacgtgggttcataggtttaggattcttagcagcaagaggtgaaccataaagatcagctaaggtcccaccttcttcatcgcgaatatccaatattttcaagactaaatcttcaatttcatttttacgacgagtggaaagtctaagtaatggaaatgtattataaactaaatttttggaatatcttaatcgtgtttccaactttcctccaattatttgaagccacaacatatgcatatgggactgtaaaattccaaacaaccataaaggagcatcatatataaccatcgttgaattgtttgcaatatagtcactattgtatatagtaataggcacatacagcctattttcagatgaagtcgcaggaatcacaatcattgaagattttgcttctcgagtatccctgaacctccatggctcatctgccaacttcggattgttagatcttgctctcttaacattctcaattcgttgtttgataagaacatttgacatagccttctgtaatagattcttttttatccacaaaacatagttatatgtcccattcagtgtatctttaccaccgattaattttttaaacagtatagctaaggacggatcatcatctataatctgggaatattctgatttagaaaaccgaagattgcccttgccatcagttggtcgattccccgaaaatatttcaggtaggttaaacaagggagccccatctttcttattaactataattgtctttccttcatttagataaacattaatgttagcaacctctttcttccctaaagaattaaataaaactttatttctatctgattcatttcctatttgaataatttcaacagttacttgtgcttggcctcttgcattgttgttccatttaaagctttgcctggccgattgtatttccaaattcatcgacataattagtggccaaaagattcctaccaattttccttcggttaatgaatttgtagttacaaaagaaaattggcttcttgtatctctaatataaagagctgcatcatagaaccaaccacaaatatagtccaattcacctgttttgatgattccattaaataatttcttcaaatctgatgtatgattatttttttgattatttgcccctagatatggtggattgccaaacaaataaacttcatcatctttttcatgtggcaatactttttcccaatcaatccgtaacgcattcccacatacaatcgcaccggcatgctgtaatggcagcgttggtcgaacagcatcgctaatttgctcatgcagcttaacgttcatctgatgctcagcaatccacaacgacaatcgcgtcacatcacatgcaaagtcgtcaatttcaattccatagaactgatccagcgtaactgatggcacatacatcgttgaaacaccaatattgttaagttcaatcagaatatcaatttcaagttgtcgcaattccttataggtaatgatcaggaaattacccgaaccacaggctggatccataaacttgatattgccgattctgtcatacagtttctgaagcttgtcttcgttacccttagcagcttcaaagtcttcgcgaagtccatccagaaatagtggcttaatcactttcatgatgttcggaactgacgtatagtgcataccgaggtgactgcggctgtcttcactagcaacagcctgaatcattgatccaagaatgtccggattaacctgattccaattcaacaattctccagcatcaatgattaattttcgagacttagaactaaacatcaaagattcgtgcggatctttaaataagtcgccgtcaacatatggaaaatcattaagccacgatggtgtgtcaacaggtcgttgtgacttttcaaaatcaagcaccccaaacaactgacttacaaatgcatcaaagtcagtcccgtcttctttagtcatttgcttaacacgattggtaaacaaattgttctcaaggatatttgtatcttcagcaaacaaacagaacagcacgcgaattaagaacaggttgagtcccttacgcgacgcgtgtggattatccttaactacaacgtcgtagagcttagcgaaacgttcagcagcacgaacatcagccggattctctttgtcaaaatcagccttctcaattccgttccacgccaagaagaactcgaacttttgaggtaattttgaaaactcaatgtccaaactatcgtgcgtcttcgtgtccttcgccagcagctgcttgtaatcagtgacgatgatgaatcgcggttttgttcccaactcatttacgcgggcctgaacatctacatacgtctgcattaaatctgaatcagtctgcttgaagtaaagcttattcttcaaataaacttcacccggttcctttgagaggttattcaagccctttctcaacttagtaatcgttgccttggggattttttcatacacacttaaaaaatcatagacgaacccttcgtgatttggttcgttaatgattgattggatttgatcttcatattcggtaattgccatgccggttcctccaccctgtacttgatacactttcacttattacattatccacaacattctgtgaatgcacaaggagcgaattctaaaaaaatcgtggagatcctcaatcacttccaagtgactgaagacttccacgattcttggtagggcttttggtggggaacctttcagatccaccgccaattcatccattttataagctaacaaatgccgttaaatcaacattacggattcaacttcatgcaatattttattcccactctgttttaagggtatggcatataagcgaaaatgctgtaatatcaaggattttggaaacgtataaaatcgaataaattatatttaaaaaaataaaaagtgcaataaaagtgcagtatttgcacctaagcagacctgattaaattcgaaatggaattctaaactcaatattcatttaaatgatagacgttcataatgagcgtctattttttatgctttgaaaggttgtgatactaacaaatttttaaatgaataaagtaagccaaaaatattttatgtgagaaaggaacgatacacttatggaattaaaatatgtcattcccaatatggaaaaaacatttggtcaattagaatatgctggtgaagggaatattgaacaacgtcgagtcaatggcagaccaactattctctctcgtagctacaatttatactcaacgattcaacgagcagatgatattgttgtcattcttccctccgaagctggcgagaaacattttgaatccgacgaaaaagtcagactcatcaacccacgtattaccgcagaaggttataaaattggcaatagaggatttaccaattacattatgcacgcagacgatatggtgaaagcttaagaaaggaaaggtgaaaaaatatgagattagcagaaggtattgtgattgaaaaagaccagacatttggcacattgaaattttccgctttacgtcgtgaggttcgtattcaaaatgaagatggttcggtttccgaagaaattaaagaacgtacctatgacttaaaatcaaaaggacaaggacgcatgatacaagtcagtatccccgcttctgttcctttgaaagaatttgactacaacgcagaagtggaattaatcaatcctgtggcagataccgtagcgacggctacttttcgaggggcagacgttgattggtacgtgaaagcagacgatcttgtattaaaaggacagacaaaacctcatcagaaatataaaaaagaagcgtccgaaagtgaaaaataggtgttgcttatgacaaacacaccattgattttgaaagaaattccgaaagatgaagccatttcttttattcggcaataccattattcaaagatactccctagattgtgtaaatactttctagggattttttcagaagaaaaattattaggcgttgtggaattaggctggggtacgcaacccctacaaaccatacgcaaactctttcccgacagttcccttcaaaccacagattatttagaaattggaaagatgtgttttcttccagaaatgaatcaaaccaattattttggcagtcaagctctttcagctctaattaagtggttgaaagaacatacggactgtcattttttatatacattggcagatggaattgagggaaaatgtggctatgtctatcaagcgtccaacttcttttactgcgggtatttcaagacaagtgtctatcgtgataaacagtcatgggaaaagatacaccctcgaagtgctcgccttttattagaggaaaatgctcgttttgaacaggtagagaaaaagcattggctttcccaggcattttgcgaatacaaagggattgagaaaatcaatggacgcatgtttcgctatctctatccgttgacaaaagaagcgaaaaaactgttaggacacacgctctatcgacgtcattattatccgaaagaaaaagatttacgctttgaaaagcgaatcgcttatcggaaatatgaagccatttctcaaccaacttttgataaacaggctcgtatctacaatacacaattattttgatagatggaaaggaggatttttatgccattgcttcatgacagaggaaagcgaatcaaagccaacgataaggacttggtctatcattttgtgctgatttcattgctgatagtttttctagtcgttctactcccttttcattggagaacgttacaatcggtgaattggcaaacagttcagttagatacatttttctatcaactgcatacgccatacttttggagcagtattctcactgctttttttgtatgcggactcatcagctggctctattatcactatcgcatagattctataaaacagttagagcaccgtcaaaagttagctcgtatgattttagaaaaccattggtatgaagccgaagaaactcaatcagagggattctttaaagacttatccagcaagaaaaccaaacaacgaatccgccattttcctaaaatgtattaccgaatgaaagatggactgatccatattcatgtagaaatcactttagggaaatatcaagatcagctcttgcacttagaaaacaaactagaaacaggcttgtattgtgaattagtggaaaaaacgttgaaagattcttatgtagagtatgttctactttatgacaccattggcaatcgaattggcattgaagatgtggtagctcaagatggacgtgtcaaattgatggaatcggtctattgggagtttgattctctccctcacatgttaattgctgggggcacgggtagtggaaaatcctattttattctcacattgattgaatctctcctgcatacaaatgcgaagctttatattctcgaccctaaaaatgctgatttggcagacttaggagcggtcatagataatgtctattaccgtaaagacgatatgctggcatgtattagtcaattttacgacgatatgattgcccgtagtgaaaccatgaagcaacacccgaactacaaaacaggagaaaattatgcgtatcttggtctacctgcgaacttcctgatttttgatgaatatgtggcgatgatggatatgttaggtcgtgatagtgcacaagttatgaataaactcaaacaaattgttatgctcggacgacaagcaggcttctttttaattcttgcctgtcagcgtccagacgcaaaatattttagtgatggtattcgagataactttaacttccgtgtggctttgggtcgtatgtctgaaatgggcttcggtatgatgtttggaagcgatacacaaaaacaatttttcttaaaacccatcaagggaagaggttatgtggatacaggaaaaagtgtgattagtgagttttatacaccccttgtaccaaaaaggtatgatttcttaggagaaataggaaaagtcattcaaaaaaagcaatctgagcctgtaccgcacgaagtgaaaggtacaggttcagacttgctttgattggtgtggcgttagccacgccaatcctttagccccctctacctaacaggggggcacaaatacaactgaaaacaggcaattctcatcaaccaatgttgatggtacaaggaattgcggaaaataggaaagatgtaaactcaagggtcatagtttacatcttttttagattggaggtttgcgaatggaaaacgaaaaaatttggattaaggaattgaaagaaaagcgactggcttatggcgtttctcaaaataaactggcggttgcttctcatattaccagaccttacctatcggatattgaaacaggcaaggcagtccctactcaacaggtgaaagaagatttactgaacgctttggaacgcttcaatcccgataacccattggagatgttattcgactatgtacggattcgattccctaccaatgatgtgtctcaaattatcggtgaggttttacgcttgaatatggattatatgctacacgaagactttggctattattcttatcccgaacactatcgtttcggtgatattgttgtcctagtctctcatgatgtaagtaaaggggttttattagaactgaaaggaaaaggctgtcggcaatttgaaaactttctattggctcaacatcggagctggtatggtttctttcaagattgcatggaacataaaggtattttcaaacgcttggatttagccatcaacgataaaacagggattttgaatattccagaattggcaaagaaatgtaaacaggaagaatgtatttccgtctttcggagctttaaaaattatcgcagtggtgaattggttcaccgtgatgaaaaaccagacatgggaaacaccctttatattggctcattaaaaagcgaagtctatttctgtatatatgagaaagattatgagcaatacgtgaaaaatgatattgccttagaagacgcagaaataaagaatcgctttgaaattcgtttgaaaaacgacagagccactcaagccatgaaagatttgttggaacatcaaaatgcagaaaaaacagcgtttgagattatcaatcgttatattcgctttgccgataaggacgaaaccaagcgacggagtgattggcaaaccaatgaacgctgggaatggtttatcggcaaaaatcgtggagcattacgcctaaccatacagccagaaccttattcttttgaacgaacattgaactggttacatcatcaagtcgcccctacattaaaagtcgcaagcattttagatattctcaacggtacaaccattatttccaccatgattcatgaagccaaactgacagaaaaacatgagaaattaattgaacaacaacatctaggcatggaggatttgattacatgagcctcttaacagaagaattaaagaagttagggtttcaagcgtatatacaaaatacagggaaatatacgtctctcattattgagggaaaacggcaagctggtgataccatctatacctatgatttttacaaagtgagcttttataagaattataccagtcgaataactgtttatggagagcatttaactccttttcaattattaaagcgtgtaaaaagctatatctactatcgagaaaaatatcttaaggaaaggaggacaatcacatgaattttgggcagaatttgtacaactggttcttggataatgcacagtcattggtattgttagcgattgtcgtcattggactgtttttaggttttaaacgagaattttcaaaacttattggctttttgattattgctttaatcgccgtcggacttgtgttcaatgcagctggcgtgaaagatgtgttattaaacttatttaaccgaatcattggtgcttaacagatatttttcatgataaaataggaagtatatattttgttatgaaaggatccatgaatatgtttacaaatgatcaatttaaatctcttttaattaaaacattagaaagaaagagctcttcaaattattatgaaggaggtaacgagattgtttctaaaatgaaaatatcagaggtaactttagatgagactaacgagtttacttattataaaggatacaaaagggattggaatacgctttgcacctatcttaaaataagagctccttttgatgatttagacttttttgaaagtcataaagatttgcttacccagacagcaagctccatatatgataaacaaggtgataatgtattagtggatactattttagtaccacttccagagaattacgaagtaattaactttagtcagttgaaaattagtgatgtgatttcacaagctattgaagacgctgagtctttcatgagtaatggtgaatatcaacgtgcctttgacagagttcacactgcttttcatggatatttaattgaaatactaaaaaaatatgaaattacagttcctagagacgaaaatctatctaaattatatagtaggatacaacaattaattgaaaaagaaattcaacctactgaacttgctgatatagtgaagacaacgataaggtcatcaaatggaatgattagctctcttaatgaagcaagaaataggcattcacttgcacatcctaatacaaatattattggaaagagagaagcaaaactaataataggtatttcaagtacagttacagattatattagcggataccttgataagtagcgtcattaactgattgctactttttttttgactatattttataaaaaggatgtgataagaattggaattgaaagtctatgtggcaaatttgggacggtataatgaaggtgaattagttggatcatggtttactccaccaattgatgaggaagaaatggcagaaagaatcggtttaaatgagaactacgaagaatacgccatacatgattttgagcttccttttgatgtggacgaatacacgccaattagtgaaatcaaccgtctatgtgaagccattcaagaaatcgaaggtacacctatttataatgaactcaaagaaattcaaggcatgtggtttagtagcttggaagaattactggaaaacaaagagaatattcattgttatagtgaatgtgattctatggaagatgtcgcccgttattatgtggaagaaacaggacaacttggtgaagtaccttctaatttacaaaattatattgattatcaagctttgggacgtgatatggaaatagagggaaattatcttatcacctctcatggagtatttgagtattctaattaacatggattactctaaactagcaatactgctataataattttatacgttctgaattaaggagatcattattaatataattgattatattaattctaaaatgacattttattaatgattaatcagaggaaattgatagaaaatagtctatatgtgatttatttaacgtctataatgagctgttattttttaatttcataattagttaaagtaaaaattttaagcgtaaatagctaacctaaagtatttttatctatatttttaatatagaagaaatttattaattagtgaaaacggaaatcacaactcttagctaattatttaaaaaaaggactgaggtaagatgacttttatcgcagtcttttttgctacctattaattggcgtttattttgataggagggttgctacttttcagaaaattgactagaatagatataatgattttgtgaagtaagaggagaaacaatgacacaacgctatcgagtaacggtcgcctatgatgggactgattttgccggctttcaagttcagcctaagcaacgcacagttcaaggcaccttggaaaaagctttaaccaagatgagtaagggcgcctatattcaagtttacggttccggccgaacagactctggcgtccacgctatgggccaagttgtgcatttcgactatccatctgagctccccgctaaaagcatgctacgggccttaaacagccttttaccgttagatatggaagtggttgatagccaattggcagatgatgattttcatgcgcgcttttcaacggtcggcaagcggtatatgtaccgggttgatctgggccattataccaatccgtttaaacggcgttatacgggtcactatccttatccaatcgatgttgaacggattaaggcggcattacccgacgtgatggggacgcatgactatacgagttttgcggccactggaggggtcatcaaggataaggtcagaacaatctatgaagcaaccgttgtatacaacgaagctgaaaacgaacttatttttgaattccatggcaatggctttttatataatatggtccgcatcttagtggccactttattggaaatcggtaacggtcgccgcgacgtacatgactttttacgattgtatgaagtgaaggatcggcaacaggcgcgctcaaccgcgccagcaagcggtttgtatttaaaagaagtttattataaatagactggaaatatatgagattcgattgacttaatcaataaattacggtactatagtacctggtattgtttgccccacgataggccccggaaacttattgagtgtcaaacaaacacagaatattggaggaataaatcgtgcgtacaacttacatggctaaaccaggcgaagtagaacgtaaatggtatgtgatcgatgcaacagatattgcattaggtcgtctatcaactgtagtcgcttctatcttacgcggtaaaaataaaccaacatttacacctaacgttgatacaggtgataacatcatcgtcatcaacgctgaaaaaattaaattaacaggtcgcaaagcaaccgacaagttatatcatcaccatagtaatcatcctggtggtttgaaaactcgtactgctggcgaaattcgtgaaaacaacccagaacgtttaattgaaatgtcagttaaagggatgttacctaagaactcattgggtcacaaccaattcttgaagttacacgtttacgctggtggcgaacacaaacaccaagcacaaaatccagaagtcttagacattacggacattatttaaggaggaaactatagtggctcaagtaacttataacggtacaggccgtcgtaaaaactcagtagctcgtgtacgtttagtaccaggtactggtaaaatcactatcaacaacaaagacgttgttgattacgttccatttgctaacttgattttagatatgaaacaacctttaacaattactgaaacaacagatagctatgatatcttggtaaacgttaatggtggtggattctcaggccaagctggtgcaatccgtcacggtatttcacgtgccctattgacagttgaccctgacttccgtccagctcttaagagtgctggcatgttaacacgtgaccctcgtatgaaggaacgtaagaaaccaggtcttaagaaggctcgtaaagcatcacaattctcaaaacgttaatatcaatccgatattattcggttttgcaaaacaccccacaacttatggttgtggggtgtttttttgtataaaatttaatgtagaaaacaggcgccttatggtgtaatttttaaggtatatttaaatgaatgggggagtatgtatgtttgataatggaacagagtggatacgtgcagattttcatctgcatacgagggcagataaagaattttcatatttaggtgatgatgatagatttattagtgattatattgatgcgttaaaagagcaacagataaaaatgggtgttataacaaatcacaataaatttaatttaagtgagtataagggattaaagaaaaaggccaaaaaaaatggaataatgttattacctggcgttgagttatctgtaaaagaaggaagtaatggtattcattgtttgatagtttttaaaaatgaagattggataagcggagatactgaaaaaataaatcaattcttagatgaagtttttaaagggattgataatcgggaaaaagaaaatacacgttgtaatatggatttagaacatacagttaaatgtttagattcatataataatgattactttataatgatggcacatattgagcaaaaaagtggttttttaaaagaatgtaatggcgggttaattacctcgttgagtagtaaaaagtggtttaaagataatattttagggttacaaaaaggcagagcaagaaaagaaatgaagaaacttaaaggttggatggggtatgaaataccctatatagaaggatcggattgtaagtctgttgaggatataggaaaaggaaatccatgttatatcaaaatcggagatggaaattttgactcagtagttttagcattcaaagataatcagaatcgaatttctctaagtcaaaagaagtataatcatggatatataaaatcaatccaatttattggtggaaagttggatgctcaggagatactattatcaccagagctaaatagtcttataggtattcgaggtagtggaaagtctagtattatcgaatctatccgatatgcactagacattgctccctccactgcggataaagagtataaaaataatgttgtgaagaatcttttggaatcgggaggacagataattctcaatcttcaggatgattatggaaaagagtataaagtcaaaagagtatatggtgaaacgccacatatacttgatcacaatgataaggagattaatatcagtatcaatacaattcttcaaacaccgttatattttggtcagaaagacctttcgtacatggatagtggatatgaattaaacttattaaataaattagttggtgagaacttaagtggatttgaagagagtttaagaaaagtaaataatcgcttgaataatgatgtttcaaaattactagatttggaggaagagattgagaaaataccagaactggaaaatagtttaagtgatataagacataaaattaaaatttttgatgataaaggtctcgctgaaaaattaataaaacaagttaattttcaaaaggacaaaaataaaattcaaagaattaataaattaattactgacttttacaaggaaattcaattattgatgcaatcaaatattgttgcagatttagaaaaatctaagaattttagttctattgaagtgccgaatattgctacaaaagtagaccgagaagtaaataaaactctacaaatgaaagataaaatagaaaaaatagctgctgagataaccacaagttcaaatttaatgactgaatatttaaaagacattcaagaaacaataaactcattggaagaagaatttgctgaagtaaaaagagaaatagatataccaaacttagatcctgacgattttagtaaatacaaaatgtcagaggaaaaaatagctgaaaaaatccgaaatgcaaggagtaaaagtgagaaaaaaatagaaattagatccaaaataaaaggtattttagaagaaagaaataacgttttactggatgaatttaataaatataaaaaatctattgaagagattaattctaatcaaagtgcattacaacttagtattgaattcaaaggaaataaagcagtgtttcttaatgatttgattcaaaattttaaagggacaggtattaaccaaactagttataaagctataagtgagaatttttctgatttcactgctcttgtagaagatgttctggttgataattcaaaacggatatcagatttaataagtgacacgcaattattaaaactaaaagaaagagttaggacagcttatagcaaattaattaatatcagaacaaataacaaaattgaaataaactatcacgggaaaccgatagctaaacattctataggacagcgagcatcagcgttagtgctatttattttatcccaaaagaagaacaacttaataataatagatcaacctgaagacgatttagataatcaggtaatttataatgaaataattactaacgtaaaaagtagaaaggcaaatgtccaatttatattcgctacacataatgctaatattcctgtattgggggattctgaacaaataattgctgtatcttatgatgaaaagcaaattattacggaaataggtagtatagataaaaagaaaatacagactaaaatcgttgatattatggagggaggacaggaagccttttcgaaaagaacgcaaatctataacttatggcaaaaaggctaattaactattgtaatacttttattttattgataaatacaaaagatttacacacttctgaaatattaaaggaatatgttaaacaagaagaagctgttcaggaaacagcatcatcaacttcatcagaaacggcaaccaaagctttgcctaagcaagcccaagccatgaattacgaagaggttaaaaccggtaactatgcgagtctgaatggcacttggcaaaatggtgagggtcgaaagattgtcattagggatcaaacgatgcaattttcggatatcttagaccataaaggaaccgcaacggtaatcggacaggaaattgatattccgggattagatggccaagatggtagaccgcaagatgtgccatatttaggtggcacaacgactaaagcctacgaacaacaattaaaatcaggggaaaaagatggcgtctttactttagggagtacaattccaagtgcagtcctaacgatttcattcttacctaaaggcacgatgggtgatttaaccgatggcgacgttaaccaagataaaatcatttcggttggcacgcaagatagtgctactcttgttgatgcagcagctgtttactacaaagttaattagcaccataaaaaagaccgttcaagtttttaaacttgaacggtctttttttgatgaccatcgcttaactttgcacatagacgtcagtcaatgacatattgctggtccagatgacaatcacgtttttcgaattggtggtattgacggcttcgaggccgtattcggtgctagtaccaaccggatagaaggtgacagaccaattaatggcaactgaatccgctaatagggcggctaggtggccattagtcgttttgaaattgactggatgcaaaccggcgttgtcttttaagccagctttgctgagcgttatactgtctgatgtgagttgattgttggtaatcgctaaaggtttggcattgtcgattgtcatttcgcgacctttagcttggcgacgacttaactgccattgaccggcgatactactataatcgcccgcttggatctgagtgagattcatgccagtttgctttgccggtgtttgtgatgttgttgaatcacttttagcggtggtgctttggctagtcgtttcttttttggcgacacgcgacgttgtgctgtgtgaggccgattttggatgactagttgaagcaaccttagcgttcttattgtgactagtttgtggggcttttatttgtgcttgcccacaggcggctaacgttaatatggctatgacactcaaaatgacggttaaatgcttctgcatatttctaatactcccccgagttagataataacatggtgattatttttaatgcatgttctctgataccggcaatatgtttgacagtatcgtgttgaattgtgttcaattaagagatagacctcgttataacatattctttgtcatctatttcatggtaacatgctagtgagtgaatcagatcgtttgtctttataatcatacattcctcccaagaattttacgatattttaaagtctgttaagctagttgacgataagctagctgtattactagcataacagtcactttatgctgttaatagtatcaattaaccttaaaagtgtcaacgtagcatgcacttaatacatataatactcgtatatcgttttgctacgctaaacggagggtttaattttatgacaattaatttttttggtgagaggttgaaggcggtccgtaaagcaaagcggttgactcaactagaactttcacaacgactgggggtcagtaagggaaccgtttctgcctatgagcaagggctatcatacccatccttagaaacgctggtcagtatttgtagtattcttgatacgtcagcggactacttattgaatatttctgatgatttaccttttaaaatgggtggtttaacggacgagcaaactgaaagtattttgagagttgtctcgttgattgaaaaagccaatgaaaccttgaatgatttaaataagaagtaagtcgctattattcaagaaaacacctcataacgggcagttgtggggtgtttttttaattgctcaaaaagtcagccttccgctcgatagacgaagtacggttcgatattatataatcagcttaaagtagcagtgtcagttaatgagataaggagcgtggcgtgatgaaaaagttatttgataagcggcaagtgaatcaggatgataatccagagttcgattcattctttacggaagtgttgcagaagttaccacgacaatcagcggcgattattgccaagtccttcaaccagtctaaagcattggcggagaagacgatggccaagagccggacgcagtttgatagcgtctttgccgacttcttagtgggtgttgacgatcaaaaacggcaacaagcccataatattattcatgcagcctcgttaacagcggcgattattggctgttcaccaattccattttcagatgctttcttattagtacctgtccaattgacaatgatggcccgtttgcacaaattgttcggccaatcttggtcggcgagtctcggtaaaagtttgtcgaaggaattagttttagttgggttaggtcgcagtgctgtcgggaatattttgaagcttgtaccagttgtcgggacagtcactggggcagcggttaacgcaacggttgcgatgtcgatcaccgaagcgctgggttggttgacggttaaaatgctcaacgatggcgaggatatttttaacgacatgctgtcctttaaaaatcagttcaaaacgttgtttgggttgttacaaagaaagtaacgtgcttcaattgacagtcatcaccgttaatgatttaataaacccatatcactagtttcgggaggctttttaaaatggtaaaagtattaatcgtgcataccaacatcacgcggtatcaaggcacaattgatcccacgggtttatggttgggtgagtcggcagaatttgtcgcagaaatgcaaaaggcgggcatcgactatgactttatcagtcctaaaggtggttttgtgccgcttgatccacgggggatgaagtataccgatgaagcgattttggagatttatgaacaaccagattacgttcaacgcggcttagttgccacattgaagcctagcgacgttaatccggctgattatgcagcgatttactatacagggggccacggtgtgatgtgggacttcccagataatgccgaaatccaagcgattgcgcgggcaatttatcaacaaggtggctacctgtcttcagtctgtcacggtattgcaggactcttgcaattaaaagatacaaaaggtcagtttgtgattgccggtaaaaaagtgaccggttttacaacagccgaagaagtgttggcaggtaagaagaacgtcgtaccatttttaaatgaagaagtggccgctcaaaatggcgccgaattcactaaaaagcgggcgtataagtcattcgctgtccaagatggccaattagtaacgggccaaaatccgttctcagtccaagcagtcactgacttattaattcccgcaattcaaaaataatgggtgccgtagtggtgcaaattatgttaagctgataggaacagaatagttgggagtatgaaaatggatcaaaagcaaaaagaaaaaatgcaagccttaatcgatcaaaagaagggtggcggtaagtcaaaacaaactgacgtcgctaagaatgatcggacaaagatgcgtaaaggcccaaagatttttacagaaattcactggtaatcgacttgtcgattactatttttttgccctaatttaaaattaatctgcaagacgacagtatatgtcgccagccttttttataataaaaccacattagtttaaatcgatattgggggttattaaattggaaataggtgcatgggcagattgggtaaatgtagtcgcaacagcgatattagcattaattgcaggtgtttggagttttaagaagggctcacaggtcgtattgtagaagggttatcgattgacagcggttgggattagcttaaaataagcatattatagtttattccaaggtgataggagtttaccaatgtctgatttaatcgcacaaatgcaacaccatgtttctgttcggaattttgaagcgacacccttgagcgctgaggtaaaacagcaattaattgcggcggcccagagtggttcgtcatctaacttcgtccaagctttttcaatcattgaagtgacggacttagcgttgcgcaccgagattgcgacgatttctaatagtgctagctacgtcaatcagaccggtacattttacgttttcgttgcggatttgtatcgtcaagctagcatgttgaaagcccagggtcaatctttggccggcatccaaaatatggaggccttgctagtcgcgagtgttgatacaacgattgctgctgaagatatggcggtggctgcggaatcattagggctcgggatttgttatatcggcgggattcgcaatgatatcgcgcgggtggctgagttacttgggttgccagaatatacagtgcccctctttgggttaaccgtcggcattccaaagacgaaaaatcaggttaaaccaagactgccacaaatcaatcaagtagcgcagaatcaatatccacgggcgcaatttgcggatttaaaacaatacaatcaacaaatcgcagattattacgccaatcggggatcaaatcaacaacaggctgactggacaagtaagaatttagactttttcagtgcaccacgccgtccagaagtcggggactttttgaagaaacaggggtttacattagtataaaaacctatttttttaacttttctatattaagcatttaaattcatttagtagggatgagtatgtgatgatatagaaaaggaggatgattaagatgaaagaaatcaatgtattggctcccaatgtcgaaaagctaaaagatttattagatgaatttccttttgaaatattctgcttttatataactatttttgaaaaaacatataatgaagcatatgaggataaaaaaataaatattttagatcagagaatgattgatgttgttgaaaaagctcttcaagaagattctaactttaaattaaatactttaagggtactggggaaagtaaatatgataacgataaaaaattaaatctgatagtaaaaagaaccctgacactaattgtgtagggttctttttgacatcccagcgacaaacttctatactcaaaaatgaaaccgttttaatttaaacttggaggttaagtttatgcaacctaatattcaatggttagatacaccggccgtcttcagagtgggccaattgcctgcccacagtgatcaccgttactatgcgacactggccgaaatggcccaacaacagagttcgtttgaacaatctttgaatggcacgtggcaatttcactacagtgttaatgcggcgagtcgtcctaaatctttttatgaattagcatttgatgcgcaagattttgaaccaatcacagtaccccaacatatcgaattggcgggttatgagcaattgcactacatcaacacaatgtatccgtgggaaggtcattattatcggcgtcccgctttttcaacgtccgatgacaagcaacatctcggcatgtttagcgaagccgattataatcccgtcggttcatacctgcatcattttgatttaacgccagctttgagaaatcaacgggtcatcattcgctttgaaggggtcgaacaagcgatgtatgtttggctcaatggtcaatttatcggctatgctgaagatagttttacaccgtctgaatttgacttaaccccttatcttaaagaaactgataattgcttggcggttgaagtgcataagcgcagtagtgcggctttcatcgaagatcaagatttcttccgcttcttcgggattttccgggatgttaagttattagctaaaccccgcacgcatttggaagatttatgggtaattcccgaatatgacgtggtacaacaaacgggacaggtgaaacttcgccttcaattttcaggagatgaaaaccgagtccatctacgcattagggaccaacatcaaatcatcttaacggccgatttaacaagtgccgctcaggtaaacggcctttataagatgcccgaattggttcaagcatggtccaaccaaactcccaacttatacacattagagctagaagttgtggatcaagctggggaaacgattgaaattagtcagcaaccatttggcttccgtaaaattgagattaaagataaagtgatgttgctcaacggaaaacggttagtcattaacggcgttaatcggcatgaatggcaccctgaaactggtcggacaattacggccgaagatgaagcgtgggatattgcctgcatgcagcgcaaccatatcaatgccgtccgaacatcgcattatccagatcggttatccttttataatggttgcgatcaagctggcatctatatgatggctgaaaccaatttggaatcgcatggttcttggcaaaaaatgggggcggtcgaaccttcttggaacgtcccaggttcatatgatgaatgggaagcggcgacgctcgatcgagcacgaaccaattttgaaacgtttaaaaatcacgtctcaattctcttttggtcattagggaatgaatcttacgctggtagtgttcttgagaagatgaacgcctattacaagcaacaagatccaacgcgcttagtgcattatgaaggggtcttccgggcgcccgagtataaggcgacgatttcggatgttgaaagtcggatgtatgcgacaccggctgagattaaggcttatttagataacgccccacaaaaaccatttattctctgcgaatatatgcatgatatggggaattcgctgggtggtatgcaatcgtatatcgacttattgtcacaatatgacatgtaccaaggcggctttatctgggatttcattgatcaagcactcttggtgacagatccagtgactggtcaacgtgaattacgctacggtggcgattttgatgaccgcccatcagactatgaattttcgggggatgggttagtctttgctacccgcgatgaaaaaccagcaatgcaggaggttagatactattatggcgaacacaaataaacgcttagcagtgatcttcggagatgtgactttaggacttaaaggccctgactttcactacctcttttcgtaccaaacgggtgggccagaatcattgcggattcaaggtaaagaatggctatatcgctcaccaaaaccgactttttggcgggcaactaccgataatgatcgcggcaaccaattcccattgaaatcgggaatgtggctagctgctgatcagttcattgcttgtcagtcgattacagtggcgattgacgggcaaacgattccgctgccaattgcgcccgagaacaaccgctatagtggtcaggaaacggcccaagaagtgacggttacgtatacctatcaaacaattacgacgccgcagacgacggtagaagtcagttatacgattcaagccagtggtaaaatccgtgtagcggtgacttatcatgggcaagctggattaccatcattaccagtctttggtttacgctttgtcatgccaaccccagcgacgcgctttatttatcaagggttgtcaggggaaacttatccagatcgaatggctggtggaatggctggtgagtacgaagtcaccgggctacctgtgacgccttatctggtgccacaagattgtggtgtgcacatggcaactgattgggtaacgatttatcggcaagcggttctggataatcgtttgcgcgaaccagtcgaaaccggcttgaagtttaagatggtcgatcaaccatttgccttttcatgtttgccatataccgctgaagaattggaaaatgcgacccatcattcagaactacccgcaccacaccgaacagtcttaaatctcttaggggccgttcgtggcgtgggcggtatcgatagttggggtagcgacgtagaagcggcctatcaaatagatgcgacgcaggatcgccattttgaatttgaaatttcgttttaaaaagtaaaaagagttgcggcaaaaatcatttttgccgcgactcttttttattgtaaagggctgtggcgggcgtcctgttttcaaatcagctataatagtaaataatatgttttattggtgggcaattgcctgggaaataatggtgaaatcgaggtaatgataatggaaactgaacaaatgataatttatttaacccgcctagagactgttttagatgatttagggaagctattgttcaaagcgcatttgaaggtgccacttaccttggatcgcgagcaatcacaagaactgttgcggcaaaataatcgttttgaatttaggtaccaacagctgcgaaatcaaaaaacaaagttattgaagcaattgctgaagttgacgagtggcgatatttatttacgccagaaaatcggtcagttgaacgaattgaatcagcaaagccaagcagcattggttgcggcaccagagtacaatcggcagcgcaaaattaatcgcctgcgtcagttaatcctgaacttacaaggtgaaaaaatcgaaaccagtatcgtcttatgtgaccaagtactggcttatttatacgaaaccgaaaaaaccgcgtttattgcgcactaccggccaaatgttgcgccggtggcggtgccttttttaagccgggatttcaagatggcgatgatgatgctcaactatatggatattatgttcacgccggttgagttacagcgccatattcgcttacttgtttatcgctacacccaagaatctgtggataatgtgttgatatacgatgcgcgaactattttaccgaatgccgagaaaacaggattctcagccgttgcgtattatttcaccttcaaacaacaaagtatgacctttatttcgtataaaggaacagaggggacgatggatgatccgcgaatcaaatcgtttcgtcagcgtttggataattatgtccgcgagagttatcaggactggaaatataatatcgacgcgatgttgattggtcacaccgataacgacgagcaactacaactagcacggcgtttcacccggtacgtggtccgacatgttaaaaagattgaagcaacgacacggatttatggcctcggccattcactgggcggtcattttgtccaaaccttgcagttattagatcaaccgtttaatgcgggttacaccttgaatgcggcaccggtccaattgaagcaaattaagcattatcgaccggatttatgtgatgacgcgacttggcaggtattgtttgaattaactaagcaaaatacgcaagataagaaaattgagcaactcctgcaggttaaaacgggcttacactatgccgaaattaataatgaatggtttatcaaggatttaacgcggatttattttggctttccgtatacgttctatattggaacggccaattatttgaacgcccgtaactggacctatccgtttgtggcggatattcgagagtatctcaaagatgatgagatgcaggcttatagtcaattctggggcaatctaattcattacctcaaacgagttgagaacaggaatggcacgattattttggcgagtttggtgacttacggactccaagcgctacgggaagtttacggtgccattaaaacaccagaagccaagcgcctttttagcgcttatgcgcgttatttatccgatgccaaaattttcaaagatacgccagtcgcggttcaggagaacttccaacgagaattatcgcgaccacaaacggctttacgtgtgctgcaaggtgagtggccatttttaagtagtgtgaataacgaaatggttgaaacggtgatttattttcataccattgaaggtgcccgttattttaaatctgtataaggttagtgacctattaaggggttaaaataaatggtattataaggatgaaactatattactcggggggaacaacatgttttgccaatattgtgggactaaaaatgaagcagattcacgattctgtattaattgtggcaagccactagaagacgctacagaacaaccagcaacgcaacaacctaaggaagatacggtgacacctaacaactcagctagtacgccccatgaaccggtggttagtcgtcaggcagttaaacaacaatcaaaatctaaaaagtgggtaccaatcctcattgggggcctagttgtgttagcaattgctgtgggggcaggcttttatttacaaaagccggcagcaaatactaaaatggcaacaagtgcttcttcaaaacaacaaagcacacaagcaagtgacagtgaaagtatcagtgattcagaagtatcatcaagtagttcggaatccgttgcaaatccgttatggaccgagtctaagaaggatagtctgcagagctttatggctgactggggcactgaaatggatcaggactaccaagaatatagcgaccatcataatgtctcgctgtatggtgttgatttacctggcgacttattatctggtgccattcaaaccgaagttggtgggagcccagtaactgttaaatggtctgaagatggtgtttcggccaaggcagattataaagttgtcgtagcttactcggatgccaacagtggtggtgaagaagatcatttttatctatttaccattcatgatggccgaccagtggtcttgattgcacaagaaggtcaagggagcacatcaagttcgattgcgtttaaggaaacagagaatacaacattgagaaatggattcagcgacataatcggaaactgaaagtgaggatgacagatggaaccgcgtagagaaaagtttagtaggcaaaagaatcaacgcttgggtcggaacatattagtagttgtgatcggcattattgtgattattgcggctggtattggtatcgcggtcgctaaaaatcgtcaaggtcaagctgctcaaagtcgcgctaaacaacaatcattggttgctcgcaaaaaggcccagtcaaaagccaaaaaggccgccgctaaccggtcacaaaaggcggttaaacaaacagccaaagcgactgaaaaacctaagaagcaaccaactgaaaaagcgttgacctttgatacacaaaatctaactgctaatgcgcaaaaggtcggttatgggatctactattacaacagtaagcgctcagtcggtagtaatcaggaccaaccttttatttcagctagtgtgattaagttattcatcatggattatctctatgaccagattaaacaaggtaagatttctggcggtcactatattgataaccattcagtcgatgaatggatccaattgatgattcaacagagtgataataacgcgaccaacttgttaattgattttgcgggaatgaccgaaatcaatcagtatatccaacaacaaggttatacacagactaagttagaacggaaaatgttagatgatgcagcccgtaatcaagggttggataactatacgtccgtgaaagacgtcttacaattcttgaaccaactctatcaaaatcgggatcaggcaccttacagtaagatgttgacgattatgaagggccaacaaacgcggactaaaatcccaagtcaattgccagctaatacggtcgttgctaacaagaccggcgagttagccgatgttgaaaatgatgtggggatcgtctttaaagataatgatccatttgcgattgttgtcttaacaaatcaagtccaaaatccggcagctgaacgccaagcaattggggcgttaagtttagcagcctttcaaaaataagtatgattaagagaacgttgtgataaatatcattttatcgcgaacgttcttttttgtttgaaaatgggcattagcgggcatagtcatgatagtcgttttagggtataataatatcggttataaactattgaaggttattgcacaatagctagggtgcatctagatcaggggattgatagccactaagcgttatttcgggggagtaatgccttagtgactgttcaattagatgaaccagtatgaagcaagagtatcggagacgattaattattgtaattatgagtgggcactcgtaattagacaggtatcaatatcaaaatgagactagggtcgttatcctagtctttttttgatgttgccaaatgggaacgatgctgatacgctaatgaaagcaaatcgtgtgaaatgaaggggatatattgtggatatttatttaaaacaggctatattacaagtggttgatcgcgaattaggcgcaccaatttattcccaacaaccgctggatttaaccaacggcaatacgcgggattatttaaccaataaaattaaaaaattatcgtcagcgcagagtaaaacaggcgtgattcgtcagggttctgaggttgctaaccaactattgaatatcgcctcagattttacaggtgtcagtcaacaacttgtggataagtggtatcaagcttaccaaaagagtgatgacgcgcccagtgccgatgtttttatcgccctttatgaacaggatacgcaggcttatgtcgcttttttgaaggttaattatcatgaagcttatacccactatgtgaatgctgaagagggaccgctaaccaatcagttaattattcaccaatcaattttatctaataagacgcaaaaagcagacgaagggtttgccatcaatctgcagaccttagggtttgaactaattgaaaaacaatataccttctctggagataaacggccatacctgtcaactgaagtcattgagagtgaaccgcaaccatccttggaagaaaatgtgcgggttgtgaagaaagccgccgaaaaaattggtgcgaaatttgaagtcgctaagcatgatattgtcgccaatgtgaaagaggcaatttacgaaacgattgaggcaaagggtgaaatcaatacgcaggatgttgcggccaaggtcttcaaggataatgtctcagcacaaacggaatttaaagcagcgatggttgaaaaggcgccagcggatgcgcccatttcacctgccgtgcgtgaaattgccgagaagaaatacggtaaacaaaaattaaaattatcaaatggaattgaattaatcgttccaattgacgtctatcaaaatccggacctatttgaatttatcaatcatccggatggaacaatgtcagttgaaatcaagaatgtcgacgaagtgattagtcgattatagaacatgtataaaaagggactgtacaaaagtaaatttgcacagtccctttttggcgcttatcgttttagtttaagtctgataatcttatcgcattccgtaataatcaggattaagaaaccagcgccaattgataccgcccattctaatagtgttagtggttctgtatagaatagtttttgcataaacggtacgtaagtcaaaatcaattggagaacaatcatgccagcgataatcccgaaggcttttggatttgagaagaaagcttttgaaaaggctaattttgttgttcggatgttgaagaggtagaagattttgctgatgacgatgatattgaccatcatcgtacttgcagtcacttgatcaacacctcggccgagtaaccagtcataggcccacaaggcaatcaacgccattaagaccgacacataggccatctggaagatgtcgtgtttgttcattaaggtttgacctgttttgcgtggggcccgcgccataatgccatcttcagcaggttcgaagatgaaggcaaattgaatcgtaattgccgaaaccatgttaatccagagtaactgagcagcttggagcggcattgattgttgcattaaaatcgtgaaggcgataattaaaccttcagcaaatgacgttggtaataagaagagaatactctttttgatattatcgtaaatacgccgtccttcttgaattgcgacggacatggtggcaaagttatcgttggttaaaatcatatccgcagaatccttagcaacatcggtccctttaatccccattgcaaccccaatatcagcacgttttaaagcaggcgcgtcattgacaccgtcaccggtcattgccgtcactttgtgttgtttttggagcgcttcgacgatttcgagtttgttgctaggagtggttcgagcgaaaacctgatgttcaaccgcggcaatttctttatcctcaggggataattgatcccattcagggccggtaatggttttgatgactggggccaaacctaacttttcaccaattgctttggcggtcaagggatgatcacccgtaatcattttgacatcgacaccggccgcattcatttcagccagtgcttgaatcacttcgtcacgaggcggatcgataatgccggctaagccgagcaaggtaatccctttgttaagaccttcatgcgtaatcgtcgttgttgatgctggtacgtcgaggtaaccgacagccacgacccgtttaccttgttcggagagtcgttgaacgtgttgattccaagtatctagtgggaaggcagcgtctttttgttgcgccatcgggaataatttatctggtgagcccttaatgtagaggcggcgttgaccagttgttgtttgaactaatttggcgatatagcggtaatcagaatcaaacggcaacatgtcaatttcggtattttgcggtacttgatcaatcgagaaacctttgtggtagaccgttaaaaaggcaccatcggttggttcaccgttaattgcccaaccctcatctgatttgaaaagggtggtgtcattggcttcaaaaccggcttctaagaatagggcgagagtgtcatcgataacagctggttgatcagcttgttgaatttgcccctcaggtgcataaccgttaccagaaacatggtagatttgatcggcggtaatgatatctttaaccgtcatttcatttttcgttaaagtcccagttttatcagttgcaatcacatcaacggaacctaatgtttcaacagcgggtaaggttttaacgatcgcgtgtttatttttggccatgtcactaacacccatagctaaaataacagaggttgttgcagggagtccttccggaattgaaccaacaaccatcgtgacgatagcgatggcaagtaccggtaatgagtagaggccgctgatgaaacctaagatgaataacaagatggcagcggcaataatcacgtaagaaacaccggcccctaacttattaatctcgcgggtcagcggtgtggggcgactttgtgtatgcgtaactgcttttgaaatttgaccaatttcagtttgttcagcggtcgcgacaaccacgcccaagccactcccgtttgtaacggaggttgaggcaaacgccatgttaatttggtccgctaatgggacagttgttggtgtgagcgctgctgcttgtttatcgaccgaatcagcctcaccggtcagtgctgattcttcgaggcgcaagttatcggtatcgacaattcttaaatcggcagggatgctatcgccggcttctaagaagacgacatcaccaaccactaaatcttcggtgggaatatcgattcgttggccatcgcgataaacggttgcttcggtcgccaataaatccttaatgcgttcaagtgcatctgaggcgttggcttcttggtagtaaccgataatcgcattgatgatgaccactaaaccaataatgatggcatcagaatagtgacccatcagagttgtgagtagcgcagctgcaattaagatgtagataatcaggttattaaattggcgaatgaagagttgccatttaggtgtttttttactttctagtttgttagggccgtttgtggctaaacgtttttgtgcctcgacttgggaaaggccttgttcaaaatcatttcccgggtaatctttctgtaaatcctcaatcgattgattgtaagggttaatctgggttgtcattgttgatctcctttatattgaaattcataatagttaaaattaacgccattattcctttcgccaataaagattgctttttaagcaataacacgccgcagcgtcggggttatctttcaaaaacgttcacctcctgaatagtctctatatttaaattatcaagaaactgatgctgtgtcaatctaataaaaattattagcaatagctaagcaatacttttgtaattgtgcattcgatatggtagcataattgtataagtgaaaaaattcggttgaagcattgcgcattcaagatttccttctttagggtggtagaagggaattttagtgcgcttttttatggaggaaattagaaaatgtcaacattagcaattatcttaatcagtactttattagccggtcatctcagtaaacgaatcggtatgccggcggtgattggccagctgctcgtcgggattattctgggtccggcattgttaggtgtattacatgagaatagctttattcataccttttcagagattggtgtcgtcttattgatgtttacagccggtctcgagagtaacttaacgcttttgaagaagtacttcaaacccagtgtagttgtcgcaattttgggtgtgattgtgcctgtgggatcaatttacgcgatgagtttagcgtttggcatcaatcaattggagagtctatttattggtgttattttcgctgcgacttcagtatcgatttcggtcgaagttttgcgagaattaaaagtccttgagagtcgcgaaggtacgattattttaggggctgcagtcgttgatgatttattggcggtaatcattctaagcgtcttaacaagtctcttcggtgcgcaattagccaccgctgcgcctaatcagatgggacttgggctaacctttgccttacaaattgcctttttcgtagtggtttacttcagtgttaagtggttagtgccgggtgtgatgcgcttgagtcagcggttattggtgccttatgcaaatgcgattatgtcgttagtgatttgttttgtttttgtttggctagcagaagccgttgatttgagtacagttgtaggcgccttttttgcaggaattgcgatttcgcaaacaccatatcaatctgaaattagccgtcatattgaaccactgggctatacagtcttcattcctgtctttttcgttagcattgggttatcgatgacgtttgccgatttaaatcggcatttagtcttcattattgtactaaccgttttagccgtgttggcaaaattattaggcagtggctggggtgccaaaatgatgggtgtcccacaagcgggtgcctacacaattggggcagcgatgatttcgcggggagagatggcgttgattattgcgcaaatcggttatacagcgaagttattgagtgaaatgtattattcagcgattatcttcgtcattattttgacaacgattctagcaccgtttattttgaagtcagctatcaagaaacaattggcagcaactaaataatgctgctaagcgcataagaaaagattgtgaaaaaaatcataatgcgctataattagttatggaaacgatttcaaaaactggttaaagaggttccattatggaagcagcggtcgcaaacaaagaacatacagttgatattattgattaagaagttacgtccaattaaagccaatgaagcgctcgttaagatggaatactgcggtgtttgtcacaccgacttgcatgttaaaaatggtgattttggcgaagtacctggccgtgtcttagggcatgagggtgttggaattgttagtgaaattggctcagcggtaacgtcgttaaaagtcggcgatcgggtcagtgttgcttggttcttccaaggctgtgggcattgtgattattgtgtgaatggtcaagaaacattctgtcgccaagcgcaaaatgcaggctatacggttgatggtgggatggctgaagaatgtatcgtcaccgctgattacgcagtgaaagtccctgaagatttggatccaattgcggccagcagtattacttgtgctggtgtcacaacttacaaagcaattaaggtttcagacatcaaaccaggtcaatggttggttatttttgggatggggggcttaggcaacttagcgcttcaatatgccaagaatgtcttcaatgctaaagtgattgcagtggatattaatgatgacaagttagcaattgctaaggaattaggtactgatgttatcattaatggcaagcaagaagatgtggtagcccgggttaaagaagtaactggcgatggcgcccacgcaactgtgattacggctgtttctaaggtcgctttcaaccaagctgtagatgctgtgcgtgcaacgggcaaagtggtggctgttggattgcctgttgaaacgatggatctttcaattccaagattagtattagatgggattgaagtcatcggctcacttgttgggacacgggctgatttagcggaagcttttgagtttgctgcagaaggcgcagtgacaccaattgttcaaaccagacccttggcagatatcaatgatattatgactgaaatggctgaaggtaagatttcaggccgaatggtgattgattttacaaaataaacttaaaaataaaatgaggcgttgggctaaaggcaacttttagcccaatgctttttttgttgacaaattttaaaaatagccgtacacttacgtagtaataaaaacatgtaattaattacatgataacgcggaggtaattttaatgacaaaacaatttaaagaattagaagactttttaggcacacactttatttacacgtatgataatggttggaagtacgaatggtatactaaaaacgaccataccgttgactaccgtatccatggtgggatggttgcagggcgttgggttcgcgatcaagaagccaatattgttaaactaacggacggtgtcttcaagattacttggactgaaccaactgggacagatgttgctttggacttcatgcctaacgaaaacaagttacacggtacaatcttcttccctaaatgggttgaagaacatccagaaattacggtcacttatcaaaacgaccatatcgcattgatggaagaatcacgtgaaaaatacgaaacatatcctaagttattggtacctgaattcgctacaattacttacatgggtgatgctggtcaaaacaatgaagatgttattagccaagcaccatatgaagggatgattgaagatattcaagaaggtcgttacttcgatgaaaattacaagaagattaatcgttaagctaatttagtttcctaacaaaactaatcattagcataagatgatatttgacaaaaggaagcggttacggtataatgtaattgtagtcaaataagctaacgaggtggatgatagatgacgattaatgtaggtgacttggtacgatgccaagccaatgaaatgatgacggaaccttatttagggaaggtcttggagaagtgcgaagagactgtgcacgtcttaattttgaattatatgccgaatgatcgtttcatcgtccatgaattaatgcaacaaattatcgtgaattcacagcaaatatgccgaatttcgttaacgagagttgccggttagctatcaacctaaacgattttcctcctattagtaatgcccagatgtgttcttagacatctgggcatttttcgtgttaaagtgagttttggaaaacgcttcataaaaaaagaccgctaaattggcgttttttttaaacttggatagggacaagtcaattcggatgtgatagaataatgaaggattatttgagcagtggggacgaccaaagttagggcatcctaaaatcaaagtcattgaatcctaatagttgaataactcaatcgaagagaaagaggtacttatatggataagaaacagcgagaagattcacaaaagcatgagaaatttattcattatgctgatggtagtagtctagaagaaattaacaacaccgttgcgatccctaagaacgctggtttctggaaaaccttgatggctttcatgggacccggtgcgttagttgcggttggttacatggatccaggtaactggattacatcaattgccggtggggcacaatttgcttacaccttgatcagtgttattttggtatcgaacttaattgccatgctattacaagcaatggcggcacgtttaggaattgttaccgggatggatttagcgcagatgacgcgtgccaaaaccggtaaaaagatggggattttcctgtggattgtcacagaattagccattatggcgactgatattgcagaaattattggttccgccattgcgttagaattaatctttaatattccattattatggggtgtcttaatcaccgcattcgatgtcttgctcctattattattgatgaaacttggcttccggaaaattgaagcgattgtagcaaccttagtggctgttatcttattcgtcttcttatacgaagtaatcttggcacaacctaacatgggtgatgttgtgcgtggatttgtaccaagcccaagaattatgactgacaagaagatgttgttcttggcattagggattgttggtgcaactgttatgccacataacttgtacttacattcttcaattgcgcaagcacgtcaatacgatcgtgatgatgttgctgaaaaacgtaaagcaatcaagtttacagtaatcgattcaaacatccaattaacaatcgcttttgtcgttaactgtttactattaatccttggtgcagcaatgttctatggtactaacagtgatttaggtcgttttgttgatttatttaacgctttacaaaacaaagaaattgttgggagtattgctagcccaatgttgagtttactttttgctgttgccttattggcatcaggtcaaaactcaacgattacagggacgctttcaggacaaattgtcatggaaggtttcgtccgtatgaagattccattgtgggcacgtcgggtcattacacgtgggttatcaatcttaccagttatcatcttcacggtttattaccatgggaatgaagcccaagttgaaaaccttttgatttactcacaagtcttcttgagtatcgcattgccagtttcaatgattccattgacattgtttactagtgatgaaaaaatcatgggaccattcgttaaccgcccttgggtgaaatatacggcttggttcgtaacaattgtcttaacattattgaatatctatttaatcttacaaacagtgggcctagcagcctaatgaaataagcgattagcttggccgatatcagaggcagctaatcgcttttttgattgctgttcagtaggtgtgctagactagaaagaagttattattctggagggatgatattttgtttgaagtaacaacagtccatattatgattcggttgaccctagcgaccgtaatcgctgggattattggctccgatcgggagtataaaaatcgtccggctgggattcggacgcatattctggtctgcttgggggcctgtgtcattgcgatgatccaacaggaaattgctgctcaaaatgtgcaatttgcgctacaccatttggcgattgccaccacgattcgttctgatcaggcacgtttgattgcgcaagtggtcagtgggattgggtttttgggtgccggtacaattgtggtaactcgtcataagattcagggactgacaacggcagcctcactatgggcaaccgcgggcattggcttagcaattgggatgggctattaccaaattgccgttattagtgccgttttcgtcatttttgtgattgtctttttaaagaaaattattcatatcaatacgttgaagaaaattgaaattaaatacaagcacaaactagagaccaaggaatttatccaaacttattttgaggaacaccatattcagattcgggatgtcaatttctcggtgactcaaaatgaacgggatacgatttacaccaacgtttatcgaatcgaaattccacgagagatgcaatactcagaaattgtagaagacatttcgatgaataagaatattatgacgattagaatggtcagcatttaactgaaagtattgaaaaagagattgggataaattcatttttgtcccaatctttttttgtttttaaatagtggttaagggcgttgctgtataaaaataatgaatatatgaataaaaacgattacttgtcattctttattcatataagattgacattatactggtagaattgtatatttattctaacttagaccaacaaaaaggacttgtgtatattatggagaaatcaaagaagattaatgtcaatggcttaatcttgatgatctttggatcaatttttggctttgcgaataccaccattgccttttatttaatgggatatgccagtattatctggtatatcctagcagctatctttttctttttaccaacctcattgatgttcgccgaatacggttcatcattgaaagaagcgcgtgggggcctttattcatggcttgaagcgtcaattggtaagaaggccgccttcatcggaacgttcatctggttagcctcatggattgtttggatggtatcgaccgctgcgaaagtgtggattccattttcaactttcttacaaggatcagaccaaacaacaacttggcattttatcgggttaaacgggactcaagtcgtcggtgttttaggcgtgctttggattttagcgttaaccttcctatcaagccgtgggattgataagattcagaagtttgcttctttcagtgggatggctgtggcctttttattcgcagctttcttagtgatcagtcttgcaatttggttcaagacaggctttaagcttgccgaaccaatccatggtgtgacaactttcgttaagagtccaatggcttcttatcaatcaccaatcgggatgttgtcatttgttgtcttttcaatcttcgcttatgcggggatggaaacaatgggtggcgtgacggatagtatggatcatccagaaaagacttttcctaaggggttaatgattgcgacagccttcattaccttaatctacgcgattgcaatcttcatgtgggggatttcaacgaactggcaccaagttttaggtggcgataaagccaacatggggaatatcacgtacgtcttgatgcaaaacttaggttatcaatttggacatgcgtttggtatgtcaacgacagccgctgttggtatcggtacgttatttgctcgaatcaccggattaatcatgtttatcagttaccttggggcatttgccgtcctcatttattcaccattaaaatcattcgtactgggaacacccaaagcattatggccaaaaggctttgctgaagtcaataaacacgggatgcctgaaaaggcaatgtgggcacaagctgttttggtttgtttattaattgctgttatctcatttggtggtaaagctgccagcgaattctacaacgtattaaccttgatgtcgaacgtttcaacatcattaccttatctcttcttagtgactgccttcccttactttaaggcgcgcaaagatttagagcgcccttacgagttcttcaagactaaagcatcagtgcaagctgtgacaattgttgtcgatttagtcttagtcttcgggattgccttcacgattgtgcaaccgatgctagaaggtagctatatggatgctttctggatggtcatcgggccaatcgtctttgcaattatggcgatcgcactctatcaccgttatcaaaagaaagttgcttaaaacgttatcaaaaacaggtcctcatcagagggcctgtttttttggttctcggcaaattcggagagaaaataattgcaattctcattacattttaataatgaaaataaaatagttgcattttaaaaataagttttataagtgacttttaaattttctaaggtgcaagcgattgggaagcaagagatgtttaaatttgtttaaaaaagctgtcaatagtattaagaatgagaaaatgatgagaaggctatctagcgatatgcaacctgttcaataaactagtatactttttaggtatagttttcagaaaaatttatatcaaagggggattctatgactgtcaaattacaagtcaaagatttaacgaagatatttggtaagcgggtgccgcgggccaaagaactattgaagcaaggtaagagtaaggctgagattctaaaggaaacaggtgcgacaatcggtgtcgaccgggctaactttgaagtcgaatctggcgaaatattcgttattatgggactatctggtagtggtaaatcaacattggtgcggatgattaaccgattgatcgaaccaactgaaggtagtgtgttgatagataacgaggatttaatgcagattgataagaaagaattacttgaagtccggcgcaagaaaatgagcatggtctttcagaatttcggacttttcccaaaccgcacaatcctagacaacacttcttatggattagaaattcaagggattgataaacaaacgcgcgatcaaaaagctaatgaagcgttagatctcgttggtttaaacggttatggggaacaatatccaacacaattatctggtgggatgcaacaacgggttggtttagcacgtgctttagccaatgacccagaaatcctattaatggatgaagctttctcagcgttagatccattgaaccgttcagatatgcaagatcaattacttgatttacaagaaacaatgcacaaaacaattatctttattagtcatgatttaaacgaagccctcaaaatcggcgatcacatcatgattatgaaggatggcgaaattgttcaaactggaacgccggaagatattttaacgcgtccagctgatgaatatgttgagaaatttatcgaaaatgtcgatcgtagtaaggtttatacggccggcaacgttatgattcgtccaacaacggttaatatcgaaaaagatggcccacgtttggccttgaaacgtatgcgtgaaaatgaagtttcaaccgtttatgttgtgaataacaagcgtgaattggtcgggattatcgatgcgcgggatgttttagaattagttcgtaaggaaagtcgggatcttcagtccgttgttaatgcaaacgtaccgacaaccactgaagaaacaccgattgcggatattctagatgatatttcacaaaccgggattccatttgccgtcttaaatgagaaaaaacaattacgtgggatcatcattcgcggtgccgtcttaggcgcacttgcaggaaacgaggtgaaccattttgcttaatttaatgacaattcctaaattaccacttgctagttggatggacagttttgtcgattggctaacacaatttacaggtttctttaatggtttaacaaactttatcggtgggattatcaatggctttcaatgggtctttgatttaattccgatctggttatttatcgtgattatcgcgggtgtcacttacttcgccaatcgcgatacgaagaagtggggcttaatcctttttgaagtggccggccttcttttaatctggaacttagatttctggcgggatatgacacaaacgttaacccttgtgttgacgtctagtttaatctcattagtgattggtgtgccacttgggatttggatggctaaaagtgatattgcccaggcaatatttaaaccaattcttgatttcatgcagaccatgccagcctttgtttacttgattccagcggttgcctttttcggcattgggatggtgcccggcgttttcgcgtcagtgatttttgccatgccaccaacggttcgaatgactaacctagggattcgccaagtgccaaccgaattaattgaagccgcagattcttacggttcaacagaatggcagaaattgattaaagtgcaattaccactcgccaaatcaaccttaatggccggggttaaccaaagtatgatgttagctttatcaatggtcgttattgcttcaatgatcggtgcaatgggtcttggaacccgggtttacttcgccgtaggtcggaacgatgctgggggcggttttgcagccggcttggcaatcgttattttagcgattatcattgatcgtttgacacaagcactaaacagacaacgacaacattaaggagggatttagtgattaagaagaataaattaatagcttttttcaccttaattggattagtaacgttgcttagtgcctgtagctcacaaactaagccttatgatgctaagcaaaagttaggcccacaaatcaactacacgattactgggattgatgccggagctggtattatggcttcaacgcaaaaggctttatcaacgtatcatttggaaggtcaaaactggcagttacaaaccagttcaaccgctgcaatgaccagtactttggacaaagcgattgctgacaagcgtccaatcgtgattactggttggcaaccacattggatgtttactaaatatccaatcaagtttttgaaggatcctaaaaatgtctttggccaggctgaacatatcgatacgattgttcgaaaaggccttaaaaaagatatgccagaagcttataccatccttgaccggttccactggacaccagcggaaatgtcaaaagtgatgttacaagttaatgatggcgtcgatccagaaaaggctgctaaagattggattaaagctaatcccaaacaagttgctaaatggaccaagggtgttaaaaaagttcatggtacgaaaattaagttaacttatgtcgcttgggattctgaaattgcttcaaccaacgttgttgcggaagtactccgtcaacaaggttatgaaccaacaattcaggcaatggaaatccaaccaatgtgggcgtcagtcgcaactaaagcggccgatgcacaggttgctgcttggttaccaaagacatctggtttgtactacaaggattatcaaggcaagtttgaagacttaggacctaacttagaaggcgccaaagttggcttggctgtgccgaagtacatgactaacgtgaactcaattgaggatttaaaaacgaaataaacaaaaaataggtgttatcagtcatcgatagttgatgattgaaaaaggcgttgtcgcaaaagtaatcttttgtcgcaacgcttttttattttggaaaagggcttgattgtatatacaattttgtttatactacaattattaaaacgcttacaatttggagatgaacgattatgacgtatgcaatgattgggacatggcgaatggcttatgaaggattatccaaagcgatgacgacgctcgaagcgggcggcaaaagtacggatgcaattgaaatcgctatcaaagaagtcgaagattatccattttttaaatcggttggctacggtggtttaccgaatgcacaaggtttagttgaaatggatgcggcctttatggatggcaatacgtttgcgattggggcggttgcggggattagcgatgttaaaaatcccatctcggttgcacgccaattgagtaacgatcattttaatagttttctggtaggtgctggcgcatcacaatatgcgatgttcaacggttttgaagcacgcaacatgttaacagagcgcgcgcataagttgtgggccaaacgcgttcaggaaattaacgaaaaaaatcttagtccgtatgacggtcacgatacggttggcatggtgagcttggatcaagatgctggtatggcagcaggaacttcgacttctggtttgttcatgaaaaaaccagggcgcacaggcgattcagcgttatccggcagtggcttttatgtggatagcgacatcggtggcgccaccgcaacgggtttaggcgaagatttgatgaagggctgtctttcttacgaaattgtccgcttgatgggttcgggattatcgccgcaagcggcttgtgatcaagccgtttatccatttgttgaaaaacttaagaaacgctacggcaaggtgggggaattctcactgattgcattgaataatcaaggtgaatggggcgtggccaccaatgttgaattcacttttgcagccgggaatgatgaacagacaccgcaaatttatatggctaatccagggccggatcagaccactattattgaaccaatttccgaagcttggttaatagcttacgaaaaacgaattaaggccccaattgattagaaggagtatttagaaaatggcgaagtatctatatgtcgaaattgcagaagcgttaaacgaagatgtccgggcgggaatctatggtgtccatcaaaaattaccgtcagaaacggacttagccgcgcagtttgcgacgacacggttaacaatccgcaaggcaatcgacttactcgaaaaacaacaggttgtggtccgtgatcggaatcgtgggacctatgttttagcgaccgaaggcaaaatttctagtggggctagcggtttagtgggttttaccgaagccgccaaggaattacatttggacgcgagcactcgggtgttagatttgcgccgcgcaattgtctatccagactacgttgcgtctaaattacaactcaacgagcaagaaccggtttggcagattgaacgcatccggatggccgataacgaaccaatgacgcacgaacagatttaccttaaacaaagaatactccccaacttgacggcccacgaagcgcaaggctctctctaccgtttgattgaacaagagatgccaattggttatgcgcaacaagaattagaagctgttatcttagaaccggggttaagcgaattactagaaacaacaccaggacagcccgcctttttggcgcatacggtcgcctattcgatggatggctacccaatcttttatgataattcccattatcgggctgacaagtacacgttccacaatatcttgagtcgtaaacattaaaaaggaggctatatgatgaaagtaattatcttgcttgatcagatccaagctggtctgggtggtaaagaaaaaggagatacacctttaggtggtaagaaattggcaatgggtgctgcagatacaattgataaagctttacggaaaatggattcagaaattatcgggactttctattgtgggactgattactatcaagaaaataagatagaggttaagcggaaagtcgctaagatgtgcgaaaaaatgcaagcggatgtggttatagcggggcccacatatgactatccagatttctcaacaatggcttgtgaattggctgaaaatattcaagagaacacagtaattccagtcgttgcgttgacggcgattgaaaaaaacgaggcattaattgagcagtatgaagcagctcttacaattgtaaagatgcctaaaaagggtggtactgggttatcagattcaattgatcatgcgttagaactttgtcggttgaaagtagcaaatgaagagacgagtgaatttgttacgcaatattgttattaaaaggaggtaaggttaatgcaaaagaaactagagcagattttaatgcctattgcgattaagttagggaataatgttgttttaagatcactacgggatggctttttaatcatcacaccgttaattattgtgacgtctattttcttattgattgggaactttccaattcctggttgggcagaattttggagtaatatattaggaccggactggacagaatggtttagcgctgtttctaactcggtgttcagttttacgggattactcgcttgttttgggatttcgtatgcttatggtaaaaatcgtggtttacaagcgattcataccagtgccattgcgattatttcattcttaattttgacacctacagttgtgacagttgggaaaaaatcaattggtgcgattcaaacgatgtatttaggtcctaacggtattttcttggggatttttatcgcgttagtcagtgttgaaatttaccgttttgcaattaagcgcaactggcgtattaagatgccagaaggtgtaccacctgcagttagtgaatcctttgatgcattattaccaagtggacttgttgtattagtctttttcttaattagaattgggttcagtctttctagcttcgaaacagcttataattttatttacacgttattacaagcaccgttaaaaggcgcagggaactcattaccatcagccttactgtataattttatagcaatgttactatggtgctttggtattaacggccccactattacaaatagtgtttggtcaccaattttcttcgtattgacgcaagataatttaacagctttccaaaaccatgtaccattaccacatatctacacgcaacaatttattgatatttttacaacatacggtggcggtgggagtaccttatcactcttaatcgttatgttaaccgtctgcaagtctaaacgtgttaaagaattaggaaaattagcaattgtacctgggattttcggaattaatgaaccaattatttttggattaccagttgttttaaatccaattattgcgattccgtttattattgtccctgttttaaatacattaatttcagggttagtcttccaattaggatgggtaccttatacaaacggtgttatgctaccttggacgacaccacccattatttctgggtggctatcaacagggagttggacaggatcagtattgcaattattcgaattagtcttagggatattaatttactatccatttattaagatgatggatcgccaatatttagcagaggaaacgcaagcggctatggcgacagatattgatattaattttgatgaagtctaaacatagaaagaagctatttttgtgaaagcgattcgagcggattttaaagccttatttgaacaatatgaagcagaatttttggccgatttgaaggctgttttgcgggtaccgagtgttcgtggcgttaaaacgtatcaagcaccatttgggattgggcctaagcgggcattggaaacggtgttgtctattgcgacgcgaatgggcttcagaactgggcaagtcggtgattgtgttggctgggctgaatatgggccggatgaaagccaagcaccaacctattttggcatcttgggtcatttggatgtagtcgacgttgagaatgattggcattatccaccgtttgatcttacccaagtggataacttcttgtatggacgtggtgttttggataataaagggccgctcttatccacattgtttgcactttatctgattaaaacgcaaaaaataacatttaagcaccgggttcggattatttttggcacggatgaagaatcagggagccaagatattccggtgtatctacaacaagaagcagcgccgtacgccggttttacgccagattgcaagtttccggccgtttacggggaacgtggtttgttagacgttcagttatcgttgccgattacagatggctctgagccccaaatcacggcgattgacgggcagtttgccaaaagttatttaccggatcacgctcgcctacttttagcggatgggacggtcaaaacttatcaaggcaaaaaggcgccaagtaacgcacctgaaatggcggataatgtgctaccgaaattagtggcagatgccagccaattgaggggccagaccggccaattctatcagtggctcaatgctaaaattggtaatcaatcaactggggaaaacttgggaattaattttgaagatgcggcctcgggtgctttgcagctagccttttatgggttgtcaattgaggcacaacagttgagttgtcatttaacgtgtcgttatccgatttcggtgactgaagaacaattgttagccggcatcgaagcggcgttgttaccggggatgacggtgacggttaagcggcggtatccatcgcaagtcactgatccacaattaccatttattcaacagttatcggcgatttatgcggctgatacaggtttagatggtacaccggtgacgacaaccggggtgacttacgcccgcgctttgccgaatatcatcgcgtttgggccttctttcccaggacaaaagggtatcgcgcataagggtgatgaatggctccaattcagcgattggcaaatgatgatgcaaatttattacgatagtttgttagttgttgggacacaggattagaacaaatcaaaaaggccaggacaaattgtcctgacctttttaatttgtttagcgacttgctaatgcgcccattggatcccatggtgcgagaacggttgggtgatcgtattcttctttttcaatccgttgcatttctggtgttaagaagcgtttgttgataacgatttggtagacgaattcgtcaaaccagctgtcgctcatgacgaagtagcccttagtaccgactttatcgccccatgagttttcaaccttccatttcgttggttgaccatcaacgatgtcaacgccagtaatgaccatcgcgtgtgtcattaaactttcgccgtaatctaggcgttcgcctttagaaattgaaaggtccatgttgagtaatgctgctttttgatagatttcagtatccatgataccaagtttacggtcggatgattgaccaacatcgctaccaaaccaaactgattcgccagcttggagttgtttgatggcgagttgtttgaaatcatcgatatcaagattcaaatggcgaacttcacggccgccaaccacgttgccgagcatttcaacgctgtataagtgattgtatggtttgtccgctgttggagaattgattaatgaaacgtaattttcgaggtcccaaccaacatatttttgatagaaagtttgtggtgtgaggcctttttcaatgtggtagttgtggtcatcatcgcgatattcgaagtcgaattcaacgggtggttcgcctaatgcataaacgagcatccggtaaacttcagtcaacattgtatctttctttgcttggatatcggcttcgctgacaccatcggcaaccaattgacgaagtgtgacggcatcttttctaagtttaagattcaagacactgttgagttcgcttgatttttcactgttataagtttcgggcatgactgacttaggcacaatcccgtatttttcgatgagggcgcataacatatcccattgaccgccgtcttgttggggcgtagtcattaaaaagtcgactttgcgatcgccgattggttgatcggctgtctttaagacattttcgtagaagtagtttgatttctcaaatttatcccagaagttagtgtaattttgtgaaagctcgaaatctttaatcttgaattgtgcttgtaagctgtggcgcatcgtatttaatgcggcaaacatccagcaacgaccggattgcttttgatttgaaacggcaccagtgtctaaatcgattgaaaagactgggtccattaaagcctttgaagttgtattttgactgctggctaaaaagccattgttcatcactgtgtttttgatgacgtttgattgtggaactgccttgaagtcggctttgaattgttggatattttcgggtgtgatagattgaaccattgaaaaaacctccttgagaattgggatattcattaatgtgcttttcaaaccatattcctgtgtctagcgccacaagtcaaacgattactttcagtaatcattcgcctcgttttgctagtactcggaatataaccggtttgaacgcaattctttctttaacgtacttttcaagctaactttctgcgcttagcttcgtgaggcaaataatcgactgtgtcgcttattcgcctcactgtgctaatgctcgaaagttgaccaagcttgaacgcactcattttattgtagtgcgtcccatgggtctagtttgattggggtttggtctagtaaggcttgttcttcttttgtgaggtattcttttttgataacgacttcgtatacatagtcatcaaaccaagcgtcgctcatgctgaagtagcccttattgccgaccttgtcactccaagtgttttcaacttgccattttgtgggttggtcgtcaactaggttgacaccggttaaagtcattgcgtgggaaacaacgccttggcgataatcgagtcgttggtctttaggcattgttaaatcaatactgaagagacttgagtagtcataaagattactgtccaaccaacctttttggcggtctaagtcggcgagcacgtcgttaccaaaccaaattggttcgccagctttaagtgactgaatggcgagtgcttttagacgatcgggtgggaggttcaataggcgcattggatggccttcaactacggtatcttgtgagtctaagctgtaaagttggttgtattgtttgcttgcttgtgggctgctgacaactgtgacgtaatcatcaaaattgcgattcaaatatttttgatagaagctcagtggtgtgaggccttggtcaaggtgatattgttgatcattatcgcgatagacgaagtcgaatgtttcaacgggttcgccaaaagcgtaaacgctgagacggtagatttcgcttaacatcgccgttctagtttcgctaatcttgtcagaaggtgcttgatcagcaactaattggcggagcttaatcgcatctgtccgtaatttaagatttaaggtactgttgaattcagtggttaaatcactgttgtaagtttcaggcatgacggacttgggaacggcaccgtatttttgaattaatgcgactgcattgtcccattggccgccgtcaaaatcaggtccggcaagtgcgaaggcgacttcgcgatccgtaatgggtttagtagctgttgctaggattttttcgtagaaaagattggctttttcaatgcgatcccagaatgagaggtagttttgagaaagttcaaagtttttcacgttatatttttgttcgaaatcatgacgaagtgtattgagtgtggcaaatagccaacaacgaccactctttttttggaagctgacatcaccggttggcaagtctatcgagtaggttggatcaagggttacggcagcatcagggcgctgagcgaccgcgttaatcccgttattcatgacggcattacgtagtgtttgggcttgcggcatgtcggcgagtgcttggcgcatcttgattaaattagcatgtgtaatttcttgggtcatctaatcactccttaatttcaatataccctaattctagttgatttaatgggagaagtaaacatgagatagatgggatgatgatattattgaaaagttaaaaatgaggaagaaaacggttaatatgagaattgatttgtgacgttaaagataaaaaaataaccatcataacgagtatgatggttattgggggattggcataatctagtcacttgaagagtaggttatccaaaacgggcccttgaagctagatttctgcgcttaacgacaattgtcaaattagcgattgcatcgctaattcgccactctatgttaatgttcaaaatctaaacgagcttcaaggacactctgagttgaaacgtgccattgcaagtagattcctgtgctttgctacgtcccgcaaataatcgactgtgtcgcttattcactggcctaggcaaatgctcagaatctgaccacttgcaatagcactctttttttatcttgcttttaagatttttacgccttctggtgagcctactacgacttcgttgacgaggtctaagaataagccgtgttcaacgacgccgacttgttcgcttaaccaagttgctagtaagtggggatgtgtgattttttcaaggtgcagatcaatcacttcattttttgaatctgttaagacgcgttggccgtcttcggttgttctgaattctgggttgaggccttctttaacgaacttgttgaaaacttgttgactgccaaaaggaatcacttcaacggggagtgggaagcggccgattgtatcgactactttttcttcatcaacaatccagatgttgcgagttgaggttgttgccactaatttttcgaataagtgggcagcaccaccgcctttaatcccttggaagttattatcaacttcatcggcaccatcaattgttaaatcgatatgatcgacttcgttgagcgctttaaccgagatgccgagcgatgttgcttgttctgcggttctgattgatgtgcagacgcaagttaggtggaggttttcggctttcacacgtttagcgagtgcttcgaccatgtacacgacagttgagccagtcccgagtcctaaaatcatattatcttcgacgtagtccactgaacgttcagcggccatttttttcattgcattcttatccattaagacacctcttctattgttaatagttctattatacgcaataactggtaaaaaagcgctttaaaatgggcgctttttgctaaaatttctattaaatcggtcggaaggattattcaagtccgttggttttcatggtatgatacagtagtaaaaaatagcgccaaattaggtgttaatatataggagcttttttagatgaaaaaacgaggattcgaaatagtaaccaaataccaatcagcaaacttaagtttaccagtgcggtcgactgctcattcagcaggatacgattttgcttgtgcagaggacttcgttttaccatccatctggcattataattttgtccgtctatttcggatgattcgaaacggcaaaccactagttgatgatgattttgaacgggcttctaagacgttgaaacccttcctagtaccaactgggattaaggcgtatatgcaagacgatgaatatttaatgattgccaatcgttcaagcaatcccttgaaaaaagggttagtgattcccaatggtgtcgggattattgattcagattattatgacaatgatgccaacgaaggtgaaatcttcattcaaatgttaaacttcagcccacgcgatgttattttacgtaagggtgaacgaattggccaaggtatttttatgccatatcttgtagctgatgatgaagtggctgtgacaactaaacggaccggtggctttggttcatctggtcgctagtccgtgctaacggcaatcgatcgccgatatgtgctaaaatagtagacaataagggtagtaaaggagaatcttgtggctaaagttaaaacgcagtttgtctgccagaattgtggctatagttcccccagattcttggggcgctgtccgaattgtggtgcttggaaccaaatggttgaagaacgtgaacaaccagccgcagcggcaaaatcaaatttcacaatttcagggcgcgccactgaacctgaaaaaattagcaccgttaatatccaaaaagaaccccgtgttaaaacggaattaaatgaattgaatcgtgttttaggtggcggcgttgtgccgggttcactgattttaatcggtggggatcctgggattggaaaatcaaccttgttactacaagtttcagggcaacttgaaaaagtgggtaagattttatacgtttcaggtgaagaaagtgcctcacaaattaagatgcgggcgaatcgattaggggttaatggcgatcaattgtatctgtatcccgaaacggatatgggcaatattcgccaccaaattgaaacgctcaaaccggaatacgtcgtgattgattcgattcaaacgatgagtgaaccagaagtgacttccgcagtcgggagtgtttcgcaagttcgccaagtaaccgcagaattgatgcggattgctaaaacgaatcaaattaccatcttcgtggtgggacatgtgacgaaggaaggggcgattgccggccctaagattttggaacatatggtggataccgtgttgtactttgaaggtgacacccatcacacttaccggattttacgatctgttaaaaaccggtttggttcaaccaatgaaatcgggattttcgaaatgcgggaagcgggcttgcaagaagtcgctaatccatccgaaattttccttgaagaacgactagccggtgcgactggctcagcagttgtggtttcaatggaagggacaagaccaatcttggttgagttacaaactttgattaccccaaccttgttcgggaatgcgaaacggacctcttcagggttagatcataatcgggtgtcattgattatggcggttttagaaaagcgggcgagtttgatgctttcaaaccaagatgcttatcttaaagcaaccggtggcgttaagttagatgaaccagcgattgatttggcgatggccgtttcaattgcttccagttatcgcgataaagaaattccaccaaccgattgttttgtcggtgaaattggcttgacgggtgaaattcggcgggtcaaccggatcgaacaacgcgttggcgaagcggcgaagttaggttttaaacggatttatgttcctaaaaataatttgcaaggttgggatccaccaactgatattcaagtcgttggggtcacaactattgcagaaactttaaaaaaagtattcaactaggcataagttggtgcgagaggaggttttatgatgcaacaaaaaccattaactaaaagaagagtgttaggaattgtctttgtaattctagggggtgctttagggatcacggcctttccggaattctggcgagttgttcatttagagttagtcacatatctcaataatggcattaccaatgccgtgttaggtgcaattattttttatcttttattcctggtgttggctaatccgatgttacgggcgatgcgtcaattggaaaaggcgttgtttaaacaatcacctagtttcctattatttgggagtgttttttcattaattggcttgttattagcgaatgttgtttcaattccgttataccggatgccgatttttgttctgaacactgttgtgccaatcctattgatgattgcgcttgggtacttaggcttcaaggtggggacgacccgcttagatgaatggcgtaagttcttacaacctaagaagcgtaatgccgatgtcttggaacgcaaagtagacgacaatttccgcaagtacaagattttggatacgagtgtcatcattgatggtcggattaaggaaattgctaagaccggctttatcgaaggcacgttgatggtgccgaacttcgtattacatgaattacaattaatttccgattctgcagacaacttaaaacgggcgcgtggtcgtcgtggtttagatatcttgaatgaattacaaaaggacgaaagtttatctgtcgaaatgtacgatggtgatttcgaagatttaacggaagtcgatggcaaattagtcaagttagcgaagttgctagacggaattgtggtcacaaatgattacaacttaaataaagtctgtgaattccaaaacgttcctgtgtttaatatcaatcaattggccaatacgttgaaaccagctgtcttacctggtgaagcgatgactgtcacagtggtcaaagccggaaccgaacgtcaacaaggggtcgcttaccttgaagacgggacgatgattgttgttgaagatggccaacattatcttaataaaccattagatgtgattgtgacaagtgccttacaaactgctgctgggcggatgattttcgccaaaccagcgcatcaacaaaaaggcttgaatgaaaaataagcattcagatgactttacacggtcaccaataatcggtattattgagactaactaaattgtataaattgatgaagagaagaagtagattagccggattttcagaaagcttctgggcgctgtgaagaagtaattgggttaatcgaaatgcaccttggagatgctagtagactttggctactagtcgggacaccgttatctgcttgaggcatttttgcgaagaaaagtggaaccacgctcaaccggcgtcttttgttaattaacaaagggcgctttttatttggaagagtgcaacagcgggcgcttatatttcgagcattaactggatttgacgaattggcgatgtaatcgccggtttggtaaatttggttaagcacagaaatatgcctgcaggagcacgtttaaaagaagagtgctcttggatgcggtcagcaactgagtattaataaaaaattacgaataatcccggttttaggattatttgtaattttagattaagcggaagttgttgcaaccaaaaagcacgtttaaaagaagagtgcgtcattaacgggtagcttttgagcattagcacagtgttgtgaatgaccgacagagtcggtcgtttgcaatacgtagctaagcggaaaaagctgttaatgaaagcacgtttaagaaaggaagattcgatgcttactgtttataataccctcacacgccaaaaagaaacgtttaaaccccttgaagaaggccgcgttaagatgtatgtctgtgggccaactgtgtataactatattcatatcggtaatgcgcgtagtgcgattgcgtttgatacgattcgccgctatctcgaataccgcggttatcaagttgattacgtttcaaactttacggatgttgacgataagatgattaaagcggctaacgtggaaaacatcaccgtgcctgaattagcggaccgctacattgcggcctttaaagaagacactaaagccctcaatattgaaccagcaacgcttaatccacgagcaactgataatcttgaagaaatcatagcgtttattcaagatttgattgctaaagattatgcttatgctgttgacggcgatgtttattaccgggctcgtaagtttaaggcttatggtcatcttgctggtcaagatcttgatcaactcgaacaaggtgccagcgaacatacagctactgaagaaaccttgcgtaaggaagatccaatcgattttgccttatggaaagctgaaaaaggcaacgaaattgcttgggaatcaccttggggcaagggccgacctggctggcacatcgaatgttccgtgatgtcgactaaatacttaggcgatacgatcgatattcatggtggcggccaagatttggaattcccccatcacgaaaatgaaattgcccaaagtgaagccaagactggcaaaacctttgtgaactactggttacacaatgggtttgtaacggttggggatgacgatcaaaagatgagtaagtcacttggcaatttcgtgacggttcacgatttgattcaagaagttaatccacaagcattgcgtttcttgatgagtagtacgcaataccggcggccaattcgctacagccaatcattgttggcagaagcccaaactaatttggatcgcttgaagacaacacttgataacctggctttccgtcaagcaacggctgaaccaggcgaagatcaaattgtgatggataaggcagctgaattggaaacagcttttgtcacagcgatggacgatgattttaacgttcaaaacggcttaacccaattgtacgaacttgctaaattaagtaaccaatatttggaacagacaacggttcaagccgatacattaacgtcattggcaactcgtttaacgcgactattagccatttttggtgttgcgtttaaagcggaccaattattggatacagaagttgaaagtttaattgaagaacgccaagccgctcgagcagctaaagatttcgccaagagtgatgcgattcgggaccaattgaaggatcaagggattattttggaagatacaccacaaggaatgagatggagacgcgcatgaaaaatgctttacaactaaacgggattgccttagcttacatgggggattcagcctatgaagtttacgtgcgggcccatttattagaactcggcttaaccaaacctactcgcttgcaacaagtcgcaacacactatgtgtctgctaaagcgcaagctgctttgattggtttgatgatcgatgataactatttaacagaagaagaaatgaatatttttaaacgcggtagaaatgccaaaagttatacgaaagccaagaatacgagtgtttcgacttatcggacctcaactggctttgaagcggtttttggctatctatacttaactgaacaacaagagcgcgtcgctgaattagcccactggtgtattcaacaagtcgacgctgggaggacccatgagaaaaaataataaccaatcttataatcagaagaataatgaatttaatagtcgtcggacggctaaaaatactgctaagccaacacggcgcccagctaacaagaaaccagcagcacctgtagaagaagcagcggttgaagaacaaactgatttcgtcatcgggaaacatgcttctttagaaacattgaagacgagcgacgccaagaagattaacaaaatcttccttcaagatggtttgaaagctgacttcgtacacgatgtcgttaaattagcgaaagaaaaacgattgatcatccaaaatgtgcctaagaacaagttggacttattgagcgatcgtcaaaatcaccaagggattatcttagcaatcgcaccgtttgaatatgcgagtgttgatgatatttttgctaaggccaaagcgcaagaagaagaaccttttatcttaatcttggataacttggaagatccgcataacttgggttcaatcatgcggacagctgatgcagttggtgtacacggaattatcattccaaaacaccgtgctgttggattaacatccacagttgctaaaacgtcaacgggtgcgatcgaacatattccagttgcgcgcgtcacgaacttaacgcaagaaatcaaaaaacttaaagaccgcggtctctggatttttggcaccgacatggccggcaccgactatcgtaagtgggatgctaagggcccaatcggtttaatcattggtaacgaaggcaaggggctttcaccaatcgttaaaaaagaagttgatcaaactttgacaatcccaatggtgggtcacgtgcaaagtttaaatgccagtgttgctgcgggggttctcatgtatcaggcttataatagccgtcaacctttggtatagcttatgaaaaagcagattttaattgcagatggttataatattattggtaattggcctgaattaaataagttaaagcaaaatgatcacttggcagatgcgcgtgatagtttattgcaaacattatcggagtaccggaagtttcgcgaaatcgaaattatcctcgtctttgatgcgatgtatgtgccagggattaaacaaagctatgagcaatataatcttgaggtcgtttttactgaagaagatgaaaccgctgatagttatattgaagccttagctggtaaattgatgtcaccaattaatcaggtcaccgtcgtttcaagcgatcaagctgaacaatggacaatcttttcgcggggggctttgcgggtatcttcgcatgatttctatcgcgagattaagcggacgcaccgcgagattgaccatgacgctaaacgttatcacagtaaggtgatgcaacgtaatcggccgtggaatgacgatcaattagaacgtttagcgcagatgcgcgaccaattgagtgacgaaaagactgattaaacaggcgttcgcttacagattgggcaaactcttgctaaaataacagtatggttgttgcgtgaagggagtttcggtcaatggaacaaacaaagcgcgacgaactgctgattgcagcagtggctcagaatgattcacaagcactagatgtattattcaaggcgtatttgccgatggtgtatcacaccgtggcgccatattatatccggttattcgatgaagacgattggttacaagaagcccggattgtttgttacgaaacttgccaatgttacgattgtcaaaaaggcaaaagttttgggagtttctataaattacggtttaaaaaccacattttaaatttactacgacgagaactcgcacaaaaacggcgaggtgatcgtcaggcagtattgattgcggagcggccggaacacgacgcgatttcagaagatacgatgacttactatcaattgcagtttgaattgagatgttatcttgaaacgctgtcgccttttgaattagtgtcgtttcgggtgctgaccgggcagctttcaattgatgaagcttgttgccaactcgattgtacgattgaccagttgaaacgaggccaatcaaggtgccagactaagttaaaacggtattatcaagagaatcgttaaccaaaagcggtgggaccggactaaacgggttcaccgcttttgttgatggattctaagattgacaggttcgcctgcacatgataaagtgaatgggataaacatcacttagagaggggcttttagtcatgggtgttaagaaagtcgccttagcctgtactgtctgtggttcacgtaactattacgttgctgaaaacaagaatcggacagaacgtctagagttaaacaaatattgtaaacattgcggacaatacgcacaacataaagaaacacgttaacataggaggatgaagatgattaagtttttaaaaagcgttgttgaagaaatgaaaattgttacttggcctaatgccaaacaaacgcgtaaggatacatcaactgttgtgatgacatcagttttatacgcaattttctttggcgtcgttgacttagcaattctcaaacttcttgaactatttattttttaaaactagcttaatgaagctggttttgctatacttgtggcaagcagaaaacttcgcgtggtcggagtttttttattttggtatttaaaggagaacaaacatggttgaatcactcgaaaaaagctggtacgtattacacacttattcaggctacgaaaacaaagttaaggcgaacttagaatctcgtgcccaatcaatgggaatggaaaacaacgtcttccgcgttgttgtacctgaagaagaagaacatgaaatcaaaaacggtaaggataaagttgatatgaagaaaactttccctggctatgttttggttgaaatggtgatgtcagacgaagcttggttcgttgttcggaatacacctggtgtaactggctttgttggttctcacggtgccggtagtaaaccagccccattattggacgatgaaattagccaaattttacgtcaattaggcatgagcacacgtcatttggatgttgaattcaaagtgggcgaatctgttaaaatcgttgatggtgctttctctggtttagttggtcaaattacagaagttgacgacgaaaagatgaagttaaaagttaatatcgatatgttcggccgtgaaacggcaacagaattagactacgatcaagtagacgaattagtttagagtgcgccataagccgggtatatcctgaggactaacagagagtggcgaatgattgctgcaagcaatcgtttggcattcggcgttagccgcaaggatatggcttatagaacacgtttaattaagagtgcattaccagtggttagcttttgagcatttgccaacttggcgaattggcgatgcaatcgccggtttgataagtgtagcaaagcacagaaagctactggtaaaagcacgtttaagtaataatcgagggaccgtgacaaaagtaatttttgttgcggtcccttatttgatagtcgaatattaatagtggaaacgtgctttttgaaactgacttctgtgcttagcgtcactcgtcaaacaactgcttgcagcagttattcgccgagctgtgctaatgctcaaagtcaaggcgtttcaaaagcactttttttgaacgtgctttttgaaactgacttctgtgcttagcgtcactcgtcaaacaactgcttgcagcagttattcgccgagctgtgctaatgctcaaagtcaaagcgtttcaaacgcacttcttattttagacagaatgatgtgatgaatatgtggcagattattaatcagttattagcagtcattgttattttagttgtagcagcagcgtgcttaattgggctcgattattataaattagctcacgtacagcatcactggtgtccacgactaacgcattatgaaacagcaccgacgttgtttatccacggttatcggggtaatcggtattctatggggcatttattgatgcgtctgcaaaaaacggggatcgccaaaaaagcgttagttatcaaagttgctgccaacgggaccttaacgtttaaaggcccacaagaattgacagccagtaatccgacgatccaagtcctatttcaaaataatcacgctgatgtgcaggatcaagttcgctggctcagccaaattgtggctatcttgaaaaaagattacgacgtaaccacgattaatctggtgggacactcgatgggggccatcacagtattacgttacttattaaagccgactgccgtgccagttaaagcagtcgtattactagcagcaccggttaatgatccgtcgattgggccggatactgcaacggtcttttggagcgaattaacgcaacggggaccgcgtaaaaaaacggctaattataattatttagccaaacgagtggcgcatttcccaacgtcaattagtattttgaatgtcgctggcgaattgttgggcactagccgtcacgacggctcagtggccgttgatagcagttttgcgctgcgtagtttattacgggggcgaatcgaccggtatcaagaaatgcttgttagaggcgccggtggggctcacagcatgttgcacgaaaatcggttagtcgatcaggcaattagtgattttttgtggcaagactaattttaaaagagcttgcatttttcagaattgattggtatattatgagagtatgttttcatacactagtgggagaccaaatataatggccatcttaaccacatcacggacttaaggaggtatgtttcgtggctaaaaaagtagcaaacatcgtaaaacttcaaattcctgcaggtaaagcaactccagcaccaccagtaggtccagctttaggtcaagctggtatcaacatcatgggctttacaaaggatttcaatgcacgtacagctgaccaagctggtttattgattcctgttgtcattactgtatacgaggatcgttcattcgatttcgttacaaagacaccaccagcagcagttcttttaaagaaagctgccggtgttcaaaaaggttctggcgaaccaaacactaagaaggttgcaactgtaactaaagctcaagtgcaagaaatcgctgaaactaaaatgcaagacctaaacgctgcagacgttgaagctgctatgcgcatggttgaaggtactgcaagaagcatgggattcactgtcgaaggttaattcatgcttgacactttcagtcggattttcaatgaaagttgaaaaatcaagtgggaggtcaaaaaccgttcaccacaattgcaaggaggaaaaccctaatggctaaaaaaggtaaaaattatttagaagctgcaaagcaagtggatgctactaaagcatacactgttgaagaagcaatcgacttagtaaagaaagttgattttgcaaaattcgatgcatctcttgaagttgcatatcgtttaaacgttgatcctaaacaagctgatcaacaaattcgtggtgctgtcgtactaccaaatggtacaggtaagacacaacgcgttattgttttcgctcaaggcgaacaagcaaaacaagctgaagctgctggtgctgacgtagtcggtgcagaagatttagttgaaaagatccaaggcggctggttagactttgacgttgccgttgctacaccaccaatgatggctcaagtaggtcgtttaggccgtgtcttgggacctaaaggcttaatgcctaaccctaagactggtacagttacaatggacgttactaaagcagttaacgacattaaagctggtcaagtggcataccgtgttgataaagctggtatcgttcacgcaccaatcggtaaggtatcattcgatgctgctaaattagtagaaaactttaaagctatgcaagacgtgatcatcaaagctcgtcctgcttcagctaaaggtcaatacattacaagtttatcagttagctcaacatttggccctggtgtcaaagttgatattgctagcttctaagctatcaatggcttgcgatcaacaatcggttaataaccggttgttgatcgctttttttattcttttaggtgaaaataaaccacaccttttaggtgtgggagttagaattagattcagcgttaaaaatccctttcgctatactagagaatggctaccgaccaaatctaaaagcgaaagggatttttatcatgtctcaagtaaaagacgatagtagtttagcacataccagatggaattgtaatatcacatagtgtttacctcgaagtaccggcggaaaataatatatggtgaattaagacaagacgttggtaagattttacgtcggttatgtgagttgaaagatgtagaaatattagaggcgcatgcaatgccagatcatatacacatattggttaaaataccatcaaaaatgagcgtttcaagctttatggggtatttaaaaggacgaagtgcagttattattcatgagcggcatgcaaatttgaagtataactatggtaatcgaaacttttgggcaaaaggttattatgttagtacggtaggattaaatcagaaaataattgaaaaatatatacgtgaacaagaagtggaagatcgagtaagagatagtattagtaaaaaagaatacactgacccatttaagaagtaaattagcatcagttgaacgattgagcggttggtggtcttttgttgggccccttaaaggggctttttctcgtgtggtgagcccttctagggctaataaaaagccacccgctatgcgggtggctttttactataaatacttccctggattatgtgatataatatttaaagtaaaatgataatttagtgcagtaatattaatgggggaattatatatgaaaaaaataattagtatcttttcagtcctaattttttcggttgttctagcggcttgtagtaatggggaaactactaaaaatgtggaacaaaaaaaggtttataagactaagatagagaaaatttcacaagaccacggggattggattgtatcggggaaaactacagctcctaataatacaaaaattattgttatgccggttgatagtgaaaatatgtatttcggtgaaaatttaggaactacagatgattcaatgggcttctctgaagtccaccaaggtaagtttaaagtttttattagtggtatattcatgcgaaaaggtgatgactatacagttggtgagactgttaaagtatttataggtgctatatcgaattacaaaacatcacatgtagaaagttcattacccaagaaggtagtgagtgatcttcaaaataaattacctgaagtgaaattaacgtataatcaggcacaagttaattatttaaataacgttggtaatgattccagtgatgacaatgaatcgagttctgattctaccgaagctagctctagtgaatcggaatcttcagtgtatgatagtgccgagggtgaaagtaatgcacagaactatggttatggtgattttattaaatctgataaatgggttggacaatcgttccatatttcaaaagctcaggttctacaagcaaatgaggaagaaaatggcactatgttattagtgtacacagatgacgaccctagcaacttatatatggtgctttcgaaagaaacaactgatgctgttaaagatgattttgtggatgtacaaggtatctttagtaaacgggagacatatgaaactaatattggtgggaaaaatactacaccagtattaatcgccaataagataacagttactggtaaagcggattattaaatccgatatacagcagactatgttaaagaatatttatttcatattgtaaacttggttagattcttaaaagagttcgcactgtttgtaacttccatatttaatcaagtataattgttgattaaattgtagtttatgtaggtaactataattggcgaatcttgagacgttagatgaatcaactttgaatgagtttaatattacacaaacaatcatagcaattcgactggttactgttaatagttggtgcccacgtgatagtgcatgatgtttaatgcggttaatttattatagatcggcgttaaagagataagttaacttattggatgggttaattattttattaattcttgaaatatacggactctttaattaggaagcgtttggatcaatagtttgaacaaatttaaaaaggaaccttccgttttgggggttcctttttaaattcgttcaaactaagcattaatgtcgataatttcgaattttgtgacatccactaaacctttatctgtaatccgcaagttcgggatgacgtcgagtggcattgcgccgagcttcataatcggatcgaagtgagcggtgacgtggagtttatcgtggcaaatagcattgaaggccttttgatgttcaattaaagtgtcgatgggttcgttactcattaagccgccgatgacaaatggtaatgtcgcgatgacttggccatcctgaacggcaacgccaccgccttggctttctttgagcgcttcgatggcaacgaccatgtcagtgtcgttggtgccgactactacgaggttgtgactatcgtggccgatgctggtggcaatcgcaccgttcttgatgccaaagccgttaagcaggccaaccccgacattaccagtgagatgatgtcgttcaactacggccactttagcgatgtcttcgtcaggatgatattggaaatcaccgtctacagtgtgagcgaccggtaagacgagattttgcgtccgactgatgctttgtaagccgatcacgtgggctttatcgcttgtgaggttgagttttaattggtcagcggtgaatgtatcgaggtgtacggtttgtaacaagtcatcaaaaccagtaactgaatcttcagttgttagtaagtattcgccgctggcagcaactttttgaccatcgatgaaggtttgattcacactgaattgttcgagatcatcaaccaataagaaatcggccttcaaaccaggtgcaatcccgccgcggtcagctaagccggtacattgggcagtgttgatggtggccatttggatcgccatgatggggtcgatcccgtttgcgatagcaacgcggatactttcgtctaagtggccagtttcacggagggttacggattgtaagtcgtcaccgcagagacaacagaaacgtgcgttttgcggcgtcacgcctttcaaaagggttggcatattcttagagacggtgccgtagcggagataaacatacataccgcgactgatgcgatcgagcatttcatcgacttgggtacattcgtgatcgttacgaataccagcagcggcgtatgcgtctaagccttgttcttttaaagcgggtgagtgaccgtcgatgagtttatttgcgttgagtgaaacgagtaattcgtctaaaacgccatcatcagcattgacaacaccggataattcatgaattcggcaaggccgtaagtgtgattgcggtcgtaagaatcttggatttcagcagcggtaatcacagcaccagatgtttcgagggttggattagcagtaggcacacacgagggcatggtgtacttgatatcaagtgctgtctttttggcagatgcgaccatgtattcaagtccacgcatgccagcgacgttcacgatttcgtgtgggtcggccaagatcgttgttgtgccatgtggtgttacaagtgatccgaagacagcgggtgagacattggcagattcgatatgaatatgcggatcaatcaaacctggcacaacatattggccgcgtgcatcgataacttttggtgcaaggtagtcgtcgctgataccgaggaagcgaccattaccaatcgcgagtgtgccttcaataatgcggccattatagacatcgacgacctttgcatttttaatgaccatgtcggcagcttgacggccggcagcttgatcaattagttgttttaaagttgttttatccatgagtaatctcctttatttagcaggtaattcgtgcattgtgaagagtaataataggaataagagcgcagcgacatacataatcggatgcacttttttacctttgccagcagcaatcatggtgatggggtaagtgatcagcccgaatgctaaaccgtatgagatattataggttaatgggacgcacagaataatcatgaaggctgcaaaagaagtttcgaattctgaccagtcgatgttggcaattgacttcatcatgaatgagcccacgatgattaagattggggcagtcacttgcgacgtcacaacggccagtaaaggtgagaagaataagcttaagacgaacatgatggcgacgaccacggcggtgaaaccagtccgaccaccagcagcaatcccagttgatgattcgatgtaacaagcagttggggttgaaccgaaaacggaaccggcaatcattgaggttgaatcggtgaaaagggctttgccgacttccttaggcatcttgttgtccttgatgaaaccagcttgttgagcaagtccgattaccgttccagttgtatcgaagaagacgctgaagaaaaagacgagaattacgacggccatttgaacattgaagacgttgtggatgttcataattgagacaccgaaagtgggtgctaagcttggaattgaagcgatgatgctgtgaggcattgcgattagaccagtcacgactcccatgatggctgtggccgccaaaccgatgaataaggcgccagggactttgcgggctaataaagcaacggtgacgattaaaccgaagacggtcaaccaaacgtgcggatctgaccaactcgtaatggtgacaaatgatttagcactaccgacgacgatgcccccttgttttaacccggtaaaggcgatgaataacccaatcccaacggccatggcggcttttaaattagtgggaatcgcgttaatcacgacttcgcggacttttaagaccgtgacaagcatgaaaaggagggaagcgacgaaaacaccggcaagtgctgtttgccaaggaattcccatgcctaaaacgacgggataggcgaagaaagcattgctgccgagtccgggtgcaacggcgattgggtagttagcgatgaaggccgtggctaaacagccgaccactccagttaatgcggtggcgacaaagacggcccccttatctaggccggcgtcgcctaatatagttgggttgacgaataaaatgtatgacatcgcaataaaagtggtaattccggcgatgatttcggttttaatggtcgacccacttgccttaattttgaattgacgttcgaaccagttcgttcgtgtttctgttgcaatatcaatattcttatccattatgcacctctggattagtattttaagaaccttggcattgttgtacaacaaaacaatcgtgtttttaagaagaatatgaaaaatgtttattattctgtaaatatcgttcgtgatttggtgatgaaaagggtttattttatcaaaaaagagccattagcatgaaaaacgctaatgactctctcataattcgcgattaatttagatggttgctaggacgtgattagcaatcgccaattcttcgttggttgggatcatcaagactttgatggctgaatcgggggtactgatttgacgggcacctgagccgttttcgttcaattcaggatcgatttgaacgcctaaaacagccagcttggcacagatatcagcacgtaaacgggcgtcgttttcaccgatgccggctgtgaaagtgatgacgttcgcaccaccgagttcaacgtggtagctcgcgatgaacttcacagcagaagtgataaacatgtcgtaggcgagtttagcccgtggattggtagcgcgtgttgattgaatatcgcgcatgtcagcggaaacgcctgaaacgccgagaatccctgatttggcgttcaaaagcgtgatgacgtcatcggcactcttatccaattcgttcattaagaatgggacgatggccgcatctaatgaaccagcgcgagtgcccattggaatgccttctaacggtgtgaagcccattgatgtatcgacaggcttaccattttggctggccgtaattgaagaaccgccacccagatgaagtgtaattaattttaaatcggcaacgggttgtttcaaaaagtcagctgttgcttgtaagatatagctgtgactaatgccgtgttcgccatacttgcgaatttgatagtcttggctgtattaataaggtaagccataaaaactagtttcatctggcatatcgagatagaattgactatcaaagacagccacttgagggacattagttggtaaaatgtgcatcaaggtttcaatgcagtcaacttgcacgggattgtgtaaaggtgcatacttgtcgagttgttttaatgtgtctaagttggtgcgatcaataatggttggtttttcgaacgtggtagcaccggcaacgacccggtggccgaccgcaatgatgtctgcgggtgaatgaatgatgccattgtcttcaagttgtttcaaaagtcgaagaacaccatcttcataggaaagattagcaatggcgacttgttctttttgaccttggaacttgaaggtgaagctagcttctggtgtgttcatgcgttccatgagcccgcttgccagtaaggttaaatcagattgttggaatagttgccatttcaatgatgaactacccgcgttaacgactaaaatattattcaaaaaactgcacctcttacgattaattttcttgataatctcaattttaaaccgtcttttcagaaaaataaaataagtaaaacgtaatgctaggataactaaaattaagtgccgataatgattgacgctttatggaatccatgctatatttgtagttggttatttatgctaccgaagactcaggtgccaataggcttaatatcctgccgaggaagatacgttgaaatccctctctatgtcttggtggacatggagttttttattttataagagactcttgaccacaagttttacaaatctaatggaggtgaatcaattgagcgaaacaatcattgcaaaaaaagcacaaattgttgacacagttgttgaaaaatttaataacgctgtttctatcgtagttatggattaccgtggcttaacagtagaacaagttactgaattacgtaaacaattacgtgaagctggcgtacaaatggaagttgttaaaaacacttacttgcgtcgtgcagcagacaaagctggttacgaaggtttagatgaaacattctctggccctactgcagttgcattttctaacgaagatgttgttgcaccagctaagatcatcgctaactttgctaagagtgctgatgcacttgaaatcaaaggtggtatgatcgaaggtaaagtggcaacacttgatgaaatcaacgccttggctacattaccaagtcgcgacggtttattatcaatgttactttctgtattacaagcaccagtccgcaatgtcgcatatgctgttaaagcagttgctgacagtaaagacgaaccagctgcataatttaaaattgtgtagttaaaagtgttatcaaaaaaatattacccataaaatggaggaaacaaaaatggcattagacgtaaatgcaattgttgatcaattaaaagaatcatcaatcttagaattaaacgacttagttaaagcaatcgaagaagaattcggtgtttctgcagcagctccagtagcagcagcaggtgcagctggcgcagacgcagcagctgaaaaagacagctttactgttgaattatcagaaatcggccaagaaaaggttaaagttatcaaagccgttcgtgaaatcacaggcttaggcttgaaagatgctaagggcttagttgataacgctccttcagctcttaaagaagacgtttctaaagacgaagcagaagaaatgaaagctaaattagaagaagttggcgctgtcgttaacttgaaataatttcctttatttctaagagaactccacatttgtggggttctttttttatagcttatttcatcggctattcgtttaccataagccccgttgatggcaatcatcagacagccataagcttgttgctcctttttaggaagcaccgtgttaagaaccgcttcgacgccgtagctgccactgccttgtaataaaacggtggtgtaggtttctaacttggcttgggcgagtgcgactaattgttggcggatatcttcggtgatggcgaggtagtcttgatcccaggtgctaaggtcgacttgcacagcttctttaacggcagctgatgtgctgagtgggccgagggttaaaagtaaatacggctggttcatgattaggcgtgctccttttgtggtgtttggtattttgcaagaatggcgggtagttcgctgagattatgaataacatagtcagcaccagccgctttgagggttttagtgatttctgcaaatttagcaagccgtgttttttgaggcaggtcgatgagtttggcttggcttaaaccaagaaggctactactttcgataaggccaacggttaagacgccggcatttttgccttcttgcatatcaataacggtgtcaccgactttaacgactgtttgcgggtcggtgatattgaacgcagtcatgatgtggttaatcatatcgggtgctggccgaccagcagcgacgtcttcttttgaaaccatcagttcgggatgataaccaagtagtcctgcttgcttagcggcgattgcgagcattgctttggtgtagccggtcgttgtcgcgatgtggatatgatgtgcttttaaataagtttggacttgaagaactgcaggggtcagtgttgtttctgtactcaagcgattgagcaagaattgttcaaaatagttaaagagttgcaattgatcggcatcggttatcccgcgtttgtattttgcaaaccaagcacgttgtacctctggcattttagcgagtttggcaatgtgttcatgtttttcgatgcccatatcctgtctaattctgtcggtatcgatttggatgccggcagcgttaaacgcactttgaaatgctaatactggatctaaactgccaaaatcgattatagtccctgcccaatcaaaaatgacgcattgaatatccgtcatgtgaaaaagcctccttatgtcgttgcaatattgaagtacaaattcagtatagggaaactttgtaaatctccagcgcgttttcagtaaacgttctgtaatggaattgaaaacattaggttctctcaatttggtaattgtcaatgacactgattaatatgagggagggtggccaaaaaaaaaacgcccaagacaaattgtcttggacgtatggcggttaagttagtgcttgaacgcactcagattgtaacgtgcttttcaatgtacatgcttgcgtttagcaccgctagtcaaacaaccgattgcatcggtcgttcgcctatctatgctaatgctcagaacataaccgcattgaacgcactcagatttaaaacgtgcttttcaatgtacatgcttgcgtttagcaccgtctatcaaataagtgacagggtcacttatccgctagactaagctaatcctcagcatgtagctacattgaacacacttcgttttaataattaattttataggttagttctacgaattggcctagttggcgggttttacttaattctaatggcatgtccgttaagtgggtgctgatgagggaaataccgtcgcctagtaaaacgggagcgatagtgatgattagttcatccactagttgtgcttttaagagcattgtgaacgtttcagcgccaccgactaaccaaatattgccaccatcttgtgcttttaattggcggacgaattctggcacattaccggtgaccacattggtgcggtcggcggtatcgtggagtgttttagaaaaaacataactttgtttttcctgataaggataggtcccagccagtttgatacattgttcataagttttacggcccataataatggtatcgacaccttggtaaaagctttgaatagcggcatcggattctgatgaattaagtgcggatagccaagcggtactgccatctttttcagcaataaagccgtctaaactttgcgcgagatataaaatcactttgcggtgttctggttctgtcatggtcaacacatccttttagtttggttacctacagtataccaaattaaaacgctttaatctggtttgaaccgttggtaatttagcgtgatttagcttatcatgataagaatagatgttgttaagggagcgtaatcatgacagaaaatgacttttcaccagagattcaaagtttagttgcacaagtacaggctaattatccacaaccgattaagattcgggttgcacaagaagcttctgggatgttaaaacacgaccaggcacaacgcgtgatgaatgacgatggcagtttggcaatcttattaacagatgcgacagctgtggattattcattatcacacgaactactccatttattattgttatcgaccggttttccacaggttttggaagatgtgacgactgaaaatgcccagttagatgaacaattaatggctactgggatgacattgtacaatgcggcagtccataccattattcaacaagaacaagtggcccacggttttgtcgataccgaaaccaaacaagcctatctagaaggtttccgcgataatatgacctctgaaaaagatgatccagacaaccaatgggtgatttaccgcgtcttaacgttattggatgcacttgtctttttcgatggcggtaatcaacagttggataaccagtggacaaccgattatccagtggcttatccacaagcccaaattttataccaagttttacaacggaaaacaatcgattcaccgttcacattacgccgagctgtgattaacttgtgggttgcatttgaccgcgtgttagagacgcttggttttgcggccactaacttacaacaattattgacgctaacaccggttttgagcgaacgccaattgcgtttagatgtgcgccaagtttatgatattcttcattcagaccacttgttagctaataaaacgcaacaaatggcctatgttggcattggtaaaagtgatcaacaaaatgcgtttgtcttgagtgtttctgataaagaagcaacaccagaatatttccaacgcttatatgatttatcagtccgtgatttcttaaatgaaattgaaatgccttattcactacgttaattgaggagaatgaagatgttagaagaacaatatcaaaaaattcatgcgcttgatcaacaacttgctgccctatttgaacaacggatggcagtggttgatgaaattgcccaaatcaaatttgacaatcaaatcggtttgaccaacattcaacgcgaaaaagcggtaatggaccaacgattggctgcggttgaagaaccgaagtttgaaccgtacattgttgatttatatcaaacgatgattttaatcgccaagcaatatcaagttaaaaaaatgaaggctcttaaagaacaagcagaagcctaatgccaaaatgacgtttaggggaacctgacgtcattttttagtgggtaagtatgctagaatataggtaattataaaaagacgaggatgttaaccagtgactaaacgacgctataatttagccgtgattcgttaccgcggtacattactattattaaaccgacttaaaaagccctatgctggcctttggaatgggattggtggcaagaacgagggtgacgaaactgccgaaatgggtatgcgacgcgagatttttgaagaaacgggtctcaatcagaatcaatataccttgtataatacggggtggttggactggcatattgacggtgagtttatcgccgggattgatgtctttttggcggagattaaggaatcggtgcagttaccgctctatccggttggcacgcgcgaaggcatcttacaactattcgatgagcaatgggttttatctgaagagaactacggtattgttgccgatttgaaagtgattttaccagaagtgctcgccaaaaatgttaaacgttactacaccgattttcacggggaacaattaattgcctatgaagcatttccgattgaggaggggaattaaatgatgacgaaagaacaaactttgatggtgctccaagtattgaaacgtaaattacaaggcctcagaatctttagggtcattgaagagttattttcactctatattattattaaagtctttacggccgacagccaagtgaacttattgggcgttaactttacagaaggccgagcgattgaattgatggtccttttattagtgattgaattttgcttaacgcgaattcaaactaactataagcaggtcggtcaacagttaatcgagactttaaaagatttgacggaacaagaaaaacaacttgtgcaacaatttaaacgctattaggtggtggttaaatgatcacgatcggtttaacgacttggagtgagcaccagtccctaatgccggagaaaaagcagttgacgttgaacgattacgcgcaattcttaccaattgtcgaggtcgatagtttttattatgcgctacaagcaccaaccgttagcgctaagtggctgcagcaagtgccgcaccaatttcaatttatcgtcaaagcacataaggcgatgaccaaacaggaagattacacggacttcactagtacggaaaaggaattgtttgttcgttacaaacaatcgattcaaccgctcttagatgcggggcaattaacggcggtcctatttcagttcccgccgttttttcaattgaatcaggaaaatgtgcagtacttgagacgcattcgcacgtggttgcccgatgtgccgattgcggtcgagtttcgtaatggcacttggtacgatgaagcgtataagcagaacatgtttgcttttttaaaacagttaaaaatgacacatgtaattgctgacgaagcgcagacgcccaccaatagtgtcccgtttgaaccggttgtgacgaatccagattttgcgatgctccggttgcatgggcgcaatatggccggttggcagaatccgggcgcaatgtggcgcaaacaacggaccctttatcgctataacgcagatgaattgcagcagtttgccgcaacggttcagcgcttaaccaatcaggctaaggaagtcgctattatcttcaataataattccggtggggatgctgccgataacgccttagccttacaacaaatattagggattacctttgaaaatttagcacctaaaggcccggaacaaacgtcgttattttagtgctttaaaagcagaacactttttgtcgcgggcttgattttatgctatactttgagtacttatatggattattaaaaaaggtcgagaataactttttattctcgtttttttaattaaggagcgaatcaaatggcagacaagaaaccaactttttacgtaacaacccccatctattatccttctggtaaattaacaatcgggaactcatacacgaccatcgcagcggacgtaattgcacgttacaaacgcttgatgggttttgatgtcttcttcttaacagggactgacgaacatggtttgaaactcgaacaaaaagcagctgaaaaaaatctagccccacaagcttacgtggacggtatggctgaagaaattcaagcattatggaagacgcttgaaatttcaaacgataaatttatccgcacaacagacgattaccacgtgaaagccgttcaaaagatttttgatcggttagtggaacaaggtgatatctatcttggccaatatgaaggttggtactctgtttctgatgaagaatacttcacggaatcacaattaacggaagtctacaaagacgaaaacggtaaggtcatcggtggtaaggccccttcaggtcacgaagttcaacgtgttgccgaagaaacttataagttcaagatgagcaagtatgccgatcgtttattagcatactatgaagaacacgctgattttatcgaaccatcatcacgtaaaaacgaaatgatcaacaacttcatcaaacctggtttggaagacttatccgtttcacggatctcatttgattggggaattcatgtcacaggtaatcccaaacacgttgtttacgtctggttagatgctttatcaaactacatcacagcgcttggttatggttcagatgacgatcaattattcaacaaatactggccagctgatgttcacttggtgggtaaagaaattgtgcgtttccatgcgatttactggccaatcttcttgatggcccttgatttgccattaccaaaacaaatctttggtcatggttggttattgatgaaagacggtaagatgtctaaatctaaggggaacgttgtttaccctgaaatgttagttgaacgttacggtttagatgcgcttcgttattacttaatgcgtgccattccatttggtaacgacggcgtcttcacaccagaagatttcgtcagccggattaattacgatttagccaatgatttagggaacctcttaaaccggacagtcgcaatgatcaacaaatacgatgatggtcacgtgccaagttatcaagctgacgtcacagcttttgatgctgacttacaagcaacggcaacgcaaacaattgcccaatattcaactttaatggatcaattgaaattctcagatgcacttgatacaatctggcaattaatcagtcgtgctaataaatatatcgacgaaacagaaccatgggttttagccaaagatgacagtcgcaaggctgaacttgatagcgtcttagcacacttagcagaaagcttacggattgtggcgctcttattacaaccagtcatgacacatgccccacgggaaatgttcgcgcaattaggccttgattttgatcaagaagcacaacgcgaaatggtttacggcaacttcccagaagctgttaaagtgattgctaaagggacaccaatcttcccacgtcttgatttagacgaagaagtggcttatatcaaggaacaaatgatggctgctcaaaaagctggtttggtgaatgaaaaagtgaaagctaaacaagttgctgcagaagaagtcgcagactttgatcctaaggccactgaattagtcagtgaaaaagatgccattaaattcgaagatttcgatcaatcagaaattcgggttgctgaaatcaaagctgtttctaaggtggaaggcgctgataaactcttgaaattccgactagatgccggtgatcaaggcgatcgccaaatcatctcaggaattgcagaattctacccagatttcgaaaaattagtcggcaagaaagtcttagccgttactaacttaaaaccacgtaaattacgtggcgaattaagccaaggcatgttgctttcagcagaacacggttcagatgttgaattggtagttgtacctagcaacttagtgaatggttcacaaattggttaatttaaaataacagaaacgtcaaaagggctaaaagacatttacattctgtaggtcttttagccctttgttatggaaaagagtgcgtctgaaacgctttgactttgagcattagcatagctcggcgaataactgctgtaagcagttgtttgacgagtgacgctaagcacagaagtcagtttcaaaaagcacgtttaaatcaagagtgcgtttcaggcggttatattgtggtagattagcctagtcgcgtgaataagcgacgcagtcgattgtttgcgagacgtagctaaccgcaacaatatgcctgaaaaagcacgttttggctgtaaaaattagcatcctaaaaggagattaaaatgcagatatttgattcacatacgcatttaaacgatacgccatatgccggtcaagaagccgactttatccaacaggctgctgaactaggggttacggagatggcaattgtgggttctgatacggttttaaatgacggtgcgctacgtttagcacaacaatacaaagcgttatcggctattattggctggcatccagaatcagcaaaggattatacgaaggtccaagaagcgcaattaattgaacagttacaattaccagaagtagttgcgctaggcgaaatcggcttggactatcactgggacacgtcaccaagagacgtgcaacgaactgtttttgaacgccaaattgaaatcgccaagtccctccatatgccaatttcagtgcatacgcgggatgctttggaagatacctacaagattttaaaagaaacagatgtccgtgattgtggcgggattatccacagctttaacggtgattctgaatggttgaaacgatttatggatcttgggatgcaaatttcatttagtggggtagtcagtttcaagaatgcgcgtgaggtgcatgaagcagccaaactatgtccattagatgtgatgttagtcgaaacagatgccccttacttaacacccacgccttatcgtggtaagcaaaatcaaccaggctatacgcgctatgtggttgaggcaattgccaagttaagagaggtcgcaccagaagaaattgcggcagcgacgtatgcaaatgcgcaccgtatttttaagttaggagcaatatgaaaaaaacgattcaagaagtcatcgttgttgaaggccgcgatgataccaaacgattaagagaagtattcccggatgtcgatacaattgaaacccgcggttccgcaattaatgatgaaattgttgaaaaaattgcgttagcccaagaaaaacgcggcgtgattgtcttcaccgatcccgattttcatggtgaaaaaatccgtaagattatttcacaaaatgtgccgggtgttgaacatgcctttttaccccgttcagaagctaaaccagaaaaaatgggtggtagcttagggattgaacacgccaaaccagcggcgattaaacaagcgttagaaaacttattgacgcaagatgaagatgcagtcgaacaaattagtcagtctgatttattggtggccggcttgattgctggtccgtctgccaaggcccgtcgtgaacgtttaggggaagtcttgcatattggttacacaaatagtaaacaactgtataagcgccttaaaatgttccaggtgagccaagacgaatttggcgcagcactaagacaaattaacgaagaattaggagactaacatggaagacattgcaaacccagagcgtacgagaaaaatccttaaacggtacggttttaaatttaaaaagagtttaggtcaaaacttcttaaccaacatcacgattttaaaacaaatcgttgaagcgggtgagattactaaagatgatgacgttatcgaaattggccccggaattggttctttaacggaacaaattgctagaaaagcgcaccaagttttgagttttgaaattgatgatcgcttaattccagttttaaaggatacgttaaatcattatcataatgtgacggttttaaaccaagatatcttggaagctgacttgccaaccttgattgccaagcattttgacggccaacacaaccttaaaattgtcgctaatttgccttattacatcacaacaccaatcatgttacatttattggaagccggtttaccaatcgatcgcatggtcttgatgatgcaaaaagaagtcgcagaacgaatcgatgctgcaccaggttcaaaagcttatggttcattgagtatcgctgttcaattgcactccgaagttaaattagcctttattgttcctaagacagcctttgtgccccaacccaacgtcgattcagcgattgttgaatttgtgggacgtcaagaacccttggtgactgttcaaaaccaacaattatttgatcaattagttcgcggtgcttttgcgcaacgtcgtaaaacactctggaataatttacaaaaccaatttggaaaacaagaagaagtcaaagcagggttagtcgctgcattggatcaagctgacattgccccaagtacccgtgcggaacagttgagtattcaacaattcgcacaattgagtgattgcttgaacgaacaaccagtttttgctaaaaaaaggggataagtaattgccaaatctagatgacaatggtataattgcaatttttcagtttatatgctatactattgctcgaagaggtgaagcatatgccaaccacacttgccaatattaagaacggtctcgatgggcatatcggagacaagttaatggttgtcgctcaagctgggcgcaagaaagtaacaaagcgaaaaggaatcttaagagaaacctttcctgccgtttttgtagttgatttggatcaagatgaaaatgcgttcgaacgtgtttcatatagctatgctgatttgttaactaaatcgattgcgattgaatttgatgaagaaccaattgtactttagtttttagaataagaatacgagcagggactgagacatggatgattgtctgagtcccttttttgttgttgacatttggtgcgtatcacgatatcgtatatggcatatactaatttataaacagccgttacttgtcgattgtcaatagtgtcaatagtcaattatgcggatttatgttacagttaaataaagtgaacaagggtgggaataattgtggaagatagtcaattattggatgagtatgttgagatttatatgtctgccattaagtatgttgaagacctcgtgtcgcaaccaactaaggcttacaaactatctttcgaacaatttctgattatgaaggagattgcggaagatagctcggttagtttaattgatattgctaagaagcgtggtgtaacacgaggggcgatttcacgtcaaattcgggtccttttgaagttggactatatttcgcaatcaactgacccaagtgatcgcagacggttaattttaaatctgacaccaagtggtcaacaaacagtgagtgagttattaccgaaggttcaggaacgtttttcatcgtggatgatggcctttggcaaagaaaatgccaaacagatgttatttttaatgaatgagttcagacaaaaagtcatggcggaagaaaattaaaagagtgggtcaagttgagaggcttgaccttttttatgtgaaggctccagtgtggtacagcactcttgaattgaaacgtgccctactaagcaacttcttccagttagtatcgtcagacaaacaatcgactttgtcgcttatttgtctgatttcactaagcttcagaagtgtccccgcttagtacagcactcttggtttttagttcataaatgagtataatgaaacaattgaatgttggtggatggtgagacgatatgcaattgattgaaaaggcacctgcgaagattaatttaagtttagatgcactttatcagcatactgatggggaattcgaatggcagatgataatgacgtcaatcgatctggcagattatgtccaaatcacattgcaagactcacctcaaattgaggttagaacctctaagggatatttaccggaggacaaacggaacttagcgtatcaggcggcgcaattattacggcatcgttttgatattaaaacaggtgcgattattgaaatcgataaacatattcccgtggcagccgggttaggtggtggcagttcggatgccgctgcagttttacgcggtttaaatcaactgtggcacttaggcctcaccaaagcggagctcgcgcatatcggtttatcaattgattcagatgtgccgtattgtgtttatagtgaaacggcactagtaacgggtaaaggcgatcaaatccaaccgttgggggatttacctaacttttggatggtcgttgttaaacctgaagtaagtgtctcaacaccgcgcatcttacacgccttgaattgcgatcagattactgatcggccccaaaccgatcgactcttagcggggatccagcaacaagatgcacagcaaatgacagccgcaatggctaatgtgttaacgccgattaccaatcaacgctatccgcaaattgattatttaatgcaacgcttaaccgcatttggtgcggaaaaagcgcagatgagcggtagtggtccaactgtttttggcatttgtcgccagtactcacgcgcgcaacgcatttataacagtatgtccggattttgtcgtgaagtttatctagtgcaaccattaaaaaaataaaaatcattaaagacaattcgtccccctatagctagtggtgggcgatttttttaatactattggtggtaagcggttaaaaagacaaatgataaaaaaacgaacaataatgaacttttctaaaaaaagactaggatttagcgaataaaatctatataattggaaagcggatagttttatcggaagaaattattattttaaagggagtaagtataatgaaagttagaagaagtgatcgcttaattgatatgacccggtacttgttggaaagaccacatacattaattccactgacgttcttttcaaatcgttacgaatcagctaaatcatctatcagtgaagatttatcaatcgtcaaacggacctttttcaatcgcgggacggggattttagaaacagttcccggcgctgctggtggtgttcgttacatgccaatgattaaacaagctgaagcagaagaatttatcgctgaaatggccgaacgtctttctgaaaatgatcgtctgttgccggggggctatgtctatttatcagatttattaggtcgtccagaagttcttcgtcaagttggtcgattaattgccaaccaatacgttggcaaagaagtaacagcggtcatgacagtggccaccaaagggattccaattgcgcagagcgttgcgatgttcctaaatgtcccatttgtcattgtgcgccgggattctaagatcactgaaggctcaacagtcagtgtgaactatgtttctggttcctcagcacgaatcgagaagatggaactttcaaaacggagtttaccagagaactcaaaagtcctaattgtcgatgacttcatgaaaggcggcggcacagttaacgggatgaagagcttaattgaagaattcgattctgaaatggttggcatttccgtatttgctgaatctgtctttgaaggtaatcacatggttgaagattacacatcaattttgaaggttgataaagtggatattgaaaacaaggcgctcagtgttagagctggtaactatttaacgaagaatgcagaacaactttcttaaactaaaaagagtatgaaacggctattagccgacttcatactctttttttgtatcgaggtggccagtacgtaataagaggccattgatggtatcggttagggtgatttgtaaggcggcactaacttgttggattgattgtggttgatctgtgcgtaaccaactggcggtataggcaacaatcgcgcctgagaggtaatcaagtagaaattgttgataagttggggataacgttaaatggtgtagctgcgtcaaatcgttgataataatttgaacgagttgacgtaggtggtggttaaagtgggtttcaaatgagttctgaccattaattgtaatcgcattttgatagaacgtgcggttgtcttcaaaataagtcagtagttgttctaaaataatggtccagtgagggtaagtcaggtgatcagcaacgtattcgccgatttcttgatcgtaaatccaagtcagcaaggcatatttatcaggaaaataatcataaaaggtttggcggcgaatgccagccgtggtcataatgagcgtcacgctaatttgcttaaacggggtatcaaccatgagcgccttaaacactgtggcaatctttttttgaatcgtaactgacatcaaaacgcctctttctacaaaaaaagtcgcccattagtgaatgacggctttggtattgactgggattgcttgataaaaccactttgcatcagcgaccgatagccggatacagccgtgagaattggatgtttcacccaatttttgcgcttcatcggggagaaaattccctgctttatcggttgggacactgtggaaaagttagacaccgtgatctaaaaatgaccgccaatatttagccccttcaccaggattgccattaaagaaggcttcaccgtgttcttcttgaatatggaaagtacctttaggtgtaggagaatcgctcgtgccggttgaagcacgcatggtatagagccgcttttcatcgtccattaagtagacgcggtgcttcttgattgaaacatcaatccaaaaatgtgcgtatttcttaacatctggatagggtttcttttcagaaggggcgtgccaatcgagtggctttttagatgtttattttttaggtgtttgtttcacgtgtgctgtttgtgaatgagtaacactcgcagttggtttagccggttggtgatgtgaggtagaccaattaataccaagcaccactaataataagattaacaggccatcgagagttaaccaaagacgtgaagggcttttttcattttaatgctccaatcggtctgaattaacatcattatacgggaatcgtagagcgatttcaaatagggatagcttgcggtaatcgcttgattaagctaaaatagaccagtaatcacgaatattaggagcataagatggtcaataaaaatgcaattattttagcagcgggtaaaggtactcgtatgaagtcaaaattatacaaggtattgcacgaagtttgcggtcgaccaatggtggaccacgtgttaaccgaagtcgaaaaaacagaacctgcaacagttgtcacaattgtgggacatggcgcagaaaaggtgaaggattatttaggtgatcgttcacaatatgccctacaagcagaacaactaggaacaggtcacgctgttttacaagctgaagatttattgaaagaccaagatggtattacaattgtggtcagtggtgatacaccattattaacagctggcacttttgaaaagctatttgcttaccatcatgacaagggcgctaaagcaactattttaacggccacagcaccagatccaactggctacggccggattattcgtaacgatattggcatcgttgaaaaaatcgttgaacaaaaagatacaaatgataaagaagctgctgttaatgaaattaacacaggtgtttactgtttcgataacaagacacttttccaagcacttcatgaagtcacaaatgaaaatgcccaaggtgaatactacctcacagacgtggttgaaatcttgaagaagaagggcgaaattgtagcagcttacaagatgccaaacttcgaagaatcaatgggggttaatgaccgcgttgccctatcacaagctaccaaagtgatgcgtcaacggattaacacagcacatatgcgaaatggtgtcacattgattgatccagaaagcacttatatcgaagtcggtgtaaaaatcggcaacgatacaattattgaacctaatgttgtcttaaaaggcaacacaacgatcggttcagattgtttcgtcggtgctggctcaacaattgttgattcaacaatcgaagataatattcaaatcacaagttcaaccattgaatcagcaatcatgcatacaggctcaaatattggtcctaacagccacttgcgtcctaacgctgaaatcggtgtggatgtacatgttgggaacttctgtgaagtgaaaaacgctaaaattggcgaccgcacgaagattggtcacttaagttatgttggtgatgcaacccttggcactgacattaatgttggttgtggcgttgtttttgttaactacgacggtgtggctaaacaccatgcaaacgttggtagccatgtcttcatcggcagcaactcaaacatcgtagccccagttgaaattgctgatcacacattcatcgcagctggttcaacaatcacagacgatgtcccagaaaaagcaatggccatcgcccgtgcacgtcaaacaaacaaagaaaattactgggctaaattgccagtcgcaaaagacgaagaatggcaatagagtgctgaatacacactaattatatactttagaatataatacctaatgatttttttatgacatcctgctttaaagttaatttaatatatgattaaaaattttgataaatagatactaagttttatggaattgtatatgccaataataactattaatgtggggagtgaattatgaaaaatatagctaaaggaaatttagtagtattaggagttacagccatattcatgtcatcagtagttattacaacaatagttgatgtatcagttcgagatgtgcaggcttcatctaaaattagtaaacatcgcaagaaggctgataaaaaagctgttgcatttaaaatgggtgaaatgacagaggcggaagcggacaagaaatacggaacacataggaatactaaagacgggaatatggtatggagtcaaaaaatcggtaaacaaacgatggttcgtgaagagaccgatgcaggtgatgttgatgtccatattattagtaagggatatgctccagataaagtattatatcgctctattgaagataatacagtacatggtgcaccgcatagcatggcaattaatacagggaaacttagtgatgaggagttagaggaagaagcaacgcgtatcgcagacgaaaatcaatggcatgctaacgatgaatttggtgaaggatttcgaaataaaaaatatgatgtccagtggaatatccaaattggtgataagaaaatgattcgtgttgattcggttggtggacgctatggagagtggtatacttctatctacagagttcataattttactgataaactaaatgataagaattgtattatcgacaaaaaaactagtttctagtttttttaacgatacttttatgcttacgtcaacagtaggaatgtaattcatagaatgacaaggagacatactataagttgggttattaatttaagataatagattgttcaatttttatgttacagttggattattatggtcacggtttaatatctgataataatgtgtcgacgtataatattaatgaattcagtgttattaatgatttaatgactggtctagctagctaataggcttaacttacttattatataaatggtttatctccaatggttttaagtaatcacacagataaaattggacctcaaattgaggtcttctgattaaaagaagtttgggaaatcaatggttatagctgttaacatttaattctctcttgcatttctaatgaacagcgcttacttagcgtaaattaaaatcttttttaggttttaatcttgattttcattgcgaaaatgcctagaatttaaataggtacttacttaaatttttggaggctgacatgtctgaacaatatttcgaccctaagttgaaaatctttgctttgaactctaataagcccttagctgagaaaatcgcagctgaagttggggttcctttaggaaaatcttctgttaaacgttttagtgatggtgaaattcagatcaatattgaagaaagtattcgtggtgacgaaattttcttaatccaatcaacatctgcaccagttaatgataacttgatggaaatcttgattatgattgatgcattacgtcgtgcatctgctaaaacaatcaacgttgtgttaccttactatggttacgcacgtcaagatcgcaaggcccgttcacgtgaaccaattactgctaaattagtagcaaacatgttaacgatggctggcgctgaccgtattttagcattagacttacatgccgtacagatccaaggcttcttcgatattccagttgatcacttaatgggtgcaccattattagctgattacttcttaagcaacgatttggcagaaaacgccgttgttgtttcacctgatcatggtggtgtgacacgtgctcgtaaattggctgacttcttgaagacaccaatcgcaattatcgacaaacgtcgtccaagacctaatgtctcagaagtcatgaacattattggtaacgttaatggtaaacgcgcaatcattatcgatgatatgattgatactgctggtacaattacattagcagcacaagctttaaaagatgccggtgctactgaagtctttgcttgttgtacacaccctgttttatcaggtcctgctatccaacgtattgaagattcagttatcaagcaaatgattgttacagattcaatcgaccttccaaaagaaaaactaattgataagatggttcaagtttcagtcggcccactaatcggggatgcgatcaaacgaatccatgaaaacaaaccagttagtccattgttcgaaaatagatttaaacgttaatcagaaattaatcggaagtcaccgcattttatgtggtggcttctttttttgtccacctgaaaaagatttccaacagtggtgattgctgaaaataaaggcgcgtcgtatgctatctgtaagcgtaatcttaataaaaagagggcaattataatggcaaatcatttcttagaaacgactaaaggacaactcattatctcatgtcaggcattagcggatgaaccacttcatagttcatttatcatggcgcggatggcaaaggcggcatatgaagcgggtgccagtgccattcgggcgaattctgttgtagatgtgcaggccattatggataccgtgccacttcctgtgattggtttagataaagtcgattacccggatgcaccaatctatatcacaccaacgctcaaagaaatgcgaggaatcgcagcgactggcgcagcggttgtggcctgcgatgtcacaggccgcccacgccccaatggtgagcagttagagacaattgttgccacgatgcgtgctgagtatcccgaaacattattgatggctgatacagcgagcctggcagatgtggaggaatctaaccgactaggatttgatcttgttgggacaacgatgtatggttatacaccagcaacggtaggctgtaatattgctgataatgattttgactacttgaaaaaggtcttggcgttatctaaagtaccagtgattgcggaaggtaaaattgattctccagagaaagcggccgccgttcttaaactcggttgccatagcgttgtcgtgggttcaagtatcacacgtccgcagttgattgctaagcattatgtcgacgcgattcaagttaaataagcgccggtctttctaaaagatgcgtggtcttctataatgaagaaaggacagatctcggtttttaaaggagttacaatggcaattatcgagcatatcaaacaacaatattcttttttatcgccacaagaacaaaaggtggccctagctgtgattcaaaaaggggcgagcattcagcggattgggattgatgaactagccgctgaactgcaagttagtaattcaaccatttcgcggtttgttcgtaagattggctgtcaaaacttcgttgattttaaattacaatttagcgaggggccccaaccgacgatgacgggggttcaaggacaggttgatcatgaatcgcaaacgtccgttgaaatttatcaattctaccaagatgtcatcactaagacacaggcacgcattaaacaagcggatcttgatcaattggttagttggatcaaaaccagccagcagctttttatctatggtttgggtagttcaggctatacggctgcggaatttggtcagcggttaacccgaatgggcattcaagcgactgtcgtcacggagagtcatatgatgttgatgacctctcggattattaacaaaacggatttagtgattggtctatcaaattctggtaatacggaagaggtcaatcaagcggtccaaaatgcgcggaaaaatggtgctaaaacggctgcaattaccagtgggactgatagtccattggcagctgcgagtgacttgacgttgtttgttgaagatagcattggctttgccagtgcgcggtttgtgaactcacaatttgcgctgacctatgttatcgatattttggcgatgttacttttagaagatgagcaatacaattggcgaatgaagcaaacagtggatacgattatgcaccacaaacttaaaaagtaattaaaaaagggcgtgtgccataagtcgggatatgacttatagaacacgtttatatcatcaatattcggataacgaaaaaggagctgaagacaaaattacttttgtcccagctccttatttcatggtgtgaatgatagcttattgatgatccttgtttgccaacaagtcgcggatttcctttaagtatagttcttcttgagtaggtgctgcttcttcagcaacttcttcttctgtcttcttgcccatgtcgcgaagtttgttgaatcctttgacgattaggaagacaataatagcgatgatcaagaagttaatcacgtcgttgaggaagttcccaatttggaaaacagccttagttcccggaattgtgacagcaatccctgaaagatctacttgaccgacgaataatgagataattggattgattaagtttttagttaatgaatctacgatactcttaagtgcagcccccaaaataaccccgactgccatgtctagcacgttgccgcgcataataaattctttaaattctttaatcataaagcgatccctccatactattaattgttttcaaggaaaattataccgtattttgcccagagaataaataataatggatggtcgctgacaataaagtgagataatatttgttattttcatgaaaaatcgttaagataggaacgagttaaaaattaaagtaattgaggcctatcgtatgaattggattgtacaattgtaccagcctttctttgaattaaataactggcaaacagttattcgttcttctgaagattggttattgattttaacattggtgattatggaatgcttgctatcagtcgataacgcggttgtgttagctgcacaaacccaaagtttaccaacaaaaattgaacaggaaaaatcactagtttatggtttgtggggcgcttatctattccgctttatcattattggtgttgggactttcttgatccacttatgggagatcaaagtcgcaggttcgctctatttagtttacttagtctatgcttatttcaggaaacaaaaacaacctaagcaagttaaaaaaccgggttctaaaattagtagcccacatcgtttctggcgcacagtcatttcgatcgagttaatggatatcgtcttctcaattgattccgtcttagcctcattagcgatttcaagtaaccctgtgattgtcttgattggtgggatgatcgggattatctgtatgcgggggattgcccagattattgcgcgtttgatggaaaagattccagaattaaacccgatggcgtatatcttgattctcttcatcgcggtgaagttgttcttatcaattccagcgattgatattgaaattcccaatcttgtgttcgcgggcattgtcttcggaacaatcttgattacgttaggaattcactatattcgcaaacaacgagcataaaaaaaggaccgacaattgtcggtccttttttttaattaagatggttcaataagactgctagaatcgcaaatagtaaactgcagattgttacaaataataactgatggcgtttcatcgagagaatcgcgatgaattcacggatggttgcgttgggtaagaagtatttcgacgtcttagcgccaataccatcagctttgagatgggcttgtttagcgaataatccagcacggaaagtgtggtagttgttcgttgagaagataattcggggtttatctttatccgtatcggcttcgataatttgctttgaaaactgcatgttttgaagtgtgttgacggatttttcttccgttaacgtctgttcaacagggatgccatggtcgattgcgtagcgttgcatggcgactgattcaggtaacttttcatccccaccttgtccgccggagaagacgagcttcggtgccggacggccttttttgacttggcggtggtagaaggtcattgcccgttcaatccgactggctaacagtggtggcacgtactgtccgtcaattaagccactacccaaaacgatgatgtagtcttgattataccgtggtcggttgaatagataggataatcagtgaagaaagataaagatagaaaaataacgggatgtaaagtagaaaaacggtgctaattgttccgatgaaaatccgtaaatcttcgggcacatggagtaagttggccaacataggcacgaagaaaagggcaattaaccctaacccgataaacagggtcagcatgttcgaaagtgtgtggctttcttttttccaaacgatgtaggcgttccataaaaagagtaagaagccaaacaagtagaaaaacaagataatcagaaaggcgacaatggctgccgcaagggcgatgtaataaacgttacgactatccgattgaaaaacgagaatggctaattcaccaaccgccgtggcaagaaagccattaaagacaatcccgttgataaaacgacgcttttcagtcaactgtagtccgacaaacagcgctaagaaaatcagcggcaaaaggtaaaaataatcgataaaggtgttcctaagtgactcctaaaggattttatttattgagtgcatatttttcgatggcataagcaacgccgtcttgaccgaggtgattactcttcgtaatgactttggcaatttttttaagttcaggaatagcgttatccatggcaactggtaaaccagcgtaagctaacattgacaggtcattgccttgatcaccgacagccatcacttctgattggtcgatgtttaaagcatttgctaagtcacgtaagccattgcctttacccgctttggtattgaggacttctaagaagtaaggttcactttggacgaattggtaacgatcgaagaaatcagctggaatcttggccttaccttcagctaaaacttcaggatcatcaatcagcatcacttttgaaaaggccttatctggagcaatttcatcaacatggcggaatttaattggcatattgaccaaggcactttcgccaattgtataaggactgatatcgcggttggccgtgtagatgaattgatcatcttcggcatgaaggtgaacgccaatcgtccgtgaaagtgtttcgagttccaagtattgtgcatgtgtgagggtgtggcgaactaggatttcaccagtagcggtattttgaactaaggcaccattaaaggtgattacataatcagaactatctgtgagccctaattcgtgtaagaagggtgtgacaccagtaagtgggcgaccggtacaaagcacgactttgatgccttgggctttagcggccttgaccacttcaatggttttggggctgaggacgttattttcgtttaataaagtaccatccatatcgactgcgacgagtttaattgacataatgagaaacactccttattggttgtgggggtgcgcttgaatcgcaccattattgatgtaactgttaaattgttgataaattggtgcaaaaacttcgagattggcggtatcgctcatttctttaggaaaatagaaacgttcatccccagagaacttacctgaaatggcagcaaccaaattactgattgaagaaagctcgtttaattggccgtcagactgaataatttcaatctgtgttttgggcgacttagctgacgggtcgtaagcgtcatacgggagatcaaagctgttgttaacggcggtatagtaggttgcgttatagccggcttgttccgtgagggcccgcatttccggtaagcaatcttctgttgatggattaaatttcactgattttaaaggacggcggctgagaaagcggtccgctaaatcgtttaaaacggtatcaggataatccaaccagtaaataaaataggtatttaagacgccatcatcgagtttgagatagtcccgcaaggtgaaatcctgttcgaagaaaggaattaataattgaggggccaagctttggtgatgatcaggttgttcgtagagaaatttagcgcgttggagcaacttttgtaagacgacttccataccacgtgagactgggtgaaaataaacttgttggtacatttgaaaacggctgacgatataatcttcaaccgcgtgcatgccgttggctaaaaaggcaatcccattagcgtagggccgcatgacccgcaaaacacgggttaaatcgaattcaccatatttggtgccggtattataagcatcccgcaataggtaatccatacgatcagcatcgatctgactagaaatcatctggacaacctgtggattaggataagtgtgatcaatgacactggccacttttgcgggaaaatcaggtgcgacttggctcagaatctgattaactctggtttcaggtgtcataataatttggcgggtaattgattcgtgatctgtattaaagatgtgttcaaaagtatgtgaataagcaccatgaccgatatcgtgtaataaggccgcgcagagtgcgacgagccgttcgctgtcattccaaaggccatcgtcaggttgcttggtggggtaattgatttggaattgatcacagatttgacgcgtaatttcataaacgcctaatgaatgggtaaaccgcgaatgttctgccccttggaagacagacgaagtcgtacccaactgtttgattcggcgaagtcgttggaattctggcgtatcgattaaatcgagaatcacttgatagtcgacacgaatatagttatgaacaggatcacgaaatactttttcgcgggttagtttttgaggggcataggtcacaaaaaaatctccttctaaggctggtatcctggttgataccggcgcaataattgtgtgttcttggtcagttgtgtttggtagtcggcttcttgcatcagtgtttgtaaatctgattgcaaggttaacccggcatttgattgcaagctagcgcttaattgttggctgacactagccaccgtgagtggttggtgcagtaaatcagcgaggttagccattgtttcgggatgtacatctgggaaggtccaacgcgtttgttgttgggctttgccagcttgatagaaatgctgcattaaagtgccacgtgcttgttggtcgccttcaatgctagcgtatagtaaaatcgcaatcccgtttttggagcgtcgttgcgcaatgccagcgaacttttgcccgttgatactaaggtcgtattcgccggggcagtaagaatgctgcacttcaaaatgcgcgatggtgatattactcgtgttgaaggtttcgctaaaaagggtcttcattaattcataagccgcattaatagagaggtgatcagcgacttctggcaggtaaaagcccagattgagaataccggtatcggcaacaatgccaagaccaccagcgttccggacaaaatagtgatagcccgcggcggtcaattgatcagtagcagcggtcaggtcaggcaatttggtatccatcatgcctaagatgactgttttttcgagtgtccaaaaatgaataattggttgttggcattctttggtgagggccaacagtgtattcgcgtgggcaaaagcgagttgaccttggtcggccgaaaattgttgattaacaacggaccaagttttctggggataaagggtcgctaaatcttgcaaaataacacctcacaattcattaatatacctataattatagcttaaattaggataactgtctttaactaaggcgggattgcttaatcaaaggtggcatggccaatttgtttagcttataatgtaactaatttagaatttagagggagtttatcatggctagcaaaaagagtacgccgattaaaattcatcttgaaacagaaattacacaagatggtcaaaccgaaagccacgttttcgatgaagaaggcgaattgatccaaatgggcacgacgacttatcttcgttacttagaacacgcacaaggccaagaaacggccgtgcgctttaagttagtagaagatgggcaagtccaattaacgcgtggcaccgaaaaagatgcgacacaattacgcctctattttaaaatgcacgatgcacagggctcactttaccaaacacaatacggcaacttaccagttttgacgacgactaatcatttattgatgacattatcagacgaaccacttagcggtgaagttgttgttcattatcaattagaaatcagtcaacaggttgttggtgattacaaattgcgattgatttttaatgcttaaactagtatgattaaggatagactgttgaaaggacgtgtactggttgaaattagacgtttttaaaggccaaaataaagaagaactatcaatgatagaagtcgctcacgcaattttagaaggcaagggcgacacaattgcatttgctgacttaacgaatgaagtccaaaattatttaggcaaaagtgatgaagaagtgcgtgcacgcttatcacaattttatacagatttaaacgaagatggtagctttatttctttaggcgaaaacgtttggggcttgcgttcttggtacccatatgaatctgtcgatgaagaagttaaccatccagaagatgaagaagaccaaccaactaagaagaaacgtcgtaagaaggttaatgctttcttagccgatgtggctgatgacgacgatgttattgattatagtgatgatgatcctgaagacgaagatttagacgttgaagatgaggcagaacttgcagtaacagatgatgattctagtgatgatctaactgaatataaagcagacttacaaagcatcggcgacgatgacgatgatgaagacgacgatgcgcttgaagatggtatcgaaggtcaattatcagaatttagcgaagatgatgatgaagacgaagaagacgaggatgacgatttatagtcgttgctctaatattcaacgttcaaacaaaaaagaggtgtccggacaaatgattttgtctgggcacctcttttttagatttagttgactgtttcaaagtgttgttcataatgcagagcggcccccactagattggcatcgtttttaaaatggcagatttgtaggttgggctgtttgaaggcctgttcaggatttgaatagaagcgtttataaaaattgatacggctatctggggccgtgagcaacgtttcaatatgagtcttcagctctggcagcaaatccgggctgttgctaatgccgccgccaatgccgataatttctggttgataggcagcatttaagaaaatcaggatttcagcgagtgacgcatacatctgatcaacttcttgactagcgatgggatcgccttgtttcgccaattcaaaaacagttttgccatcgatcgtgttaggcagtttgaaattcttcagtgagacagtcttaccaatttgaacgggtgagactttggaattgttgagtgttttgagtgtatcagcgaaccgcttttcaggattatcgaacttctcggcaagattttttaagatgagaccgtcttgaacgatggccaaaccgataccggaaccgataattgtgaataacgcgttttgatgattttggcccacaccgagggtcatttccgccaaagcggcactttcggcatcgttttgtaaggagacggggcggtttaattgggttgcaaaatcgtgttggaactcaccgagatgaagaaagggtacatagctcatgccgtgaacaatccctgtgtcttcgtccggttcaccaggacagctcaccgcaatcccagcaattggttcgtgtgcagcacaaatgtcagctactgtttgatagaacttgttccgggtgaggggtgttggaaactggtcttgatcttcgagtttttgggccgtccaaaagccgtatttaacggccgaaccaccgatatctaatactaagattgtttctgtggattgaaccatagtcgcaaacctccttgattttaacaaccaccctatagtactacaaaaaagcgtctaaaagcagttaataagttaggcgatttttgcttgacgctaaaatagttttcttgtattatattctatgggcgctttacaattatttgtgaagccagaatcggttaacaagctccctgttcattttgaatagggagcttgtttttgttttttgttgtttcccagagaactgaaggattagcattggctaagaagaaaaggagaatatttatatgaccaaatatgtttttgtaacaggtggcgttgtttcctcattaggtaaaggaatcgttgcggcttcactcggtcgtttattaaagaatcgtggcttaaaagtaacgattcaaaaatttgatccatacatcaacgtggatcccggtacaatgagcccttaccaacatggtgaagttttcgtaacagatgatggtactgaaactgatttagatcttggccattacgaacgtttcatcgacaacaatttaaataaatattctaacgtgacgacaggtaaaatttattcagaagttttacgtaaagaacgtaaaggtgaataccttggcgcaactgttcaagtcattccacatatcacaaacatgattaaagaaaaaatcatgcgtgctgcgacaactactgattcagatatcgtcattactgaaatcggtgggactgttggtgatattgaatcactaccattcttagaagcacttcgtcaaatgaaggcggatgtcggtgctgaaaactgtatctacattcacacaacattagtgccttacttaaaggctgctggtgaaatgaagactaaaccaacacaacacagtgttaaagaattacgtggtattggtatccaaccaaatgtcttggtttgtcggactgaaaaagcaattccagatgacatgcgtaacaagattgcgcaattctgtgatgttgaacccgaagcagttgttgaatcacgcgatgcagaatcaatctacgatattccattgttattgaagaaccaaggtttagatgattttgtcttgaaccacttcaagatgacagccccagaagctgacatgacagaatggatcgacatgttacacacaatcaagaatcttgaaggtacaaagaagattgccttggttggtaaatatatcgaattacaagatgcttacatctcagtgaatgaagcattacgtcatgctggttatgtttataacacagacgttaaagtgacaccaattcaatcagaagatatcactaaagaaaatgttgctgaaacattagctggtttcgatggcatcatcgtgcctggtggtttcggcgatcgtggtttggaagggatgattctttcaatccaatatgcccgtgaaaatgatgtgccatatcttggtatctgtttagggatgcaaatggcaagtatcgaatttgcccgcaacgttgctggtatcacagatgccacaactggtgaagtgcacccagatgcagaacacaaattaatcgacatcatgtcagatcaaaaagatcttgaaaatatgggtgggacacaacgtcttggtttgtacccatgtaagttaaaaccaggtactaagactgccgaagcttatgataaccaaagtgttatccaacaacgtcaccgtcaccgttatgaattcaataacgaataccgtgacttgttaacagacaagggcttagtatttgctggtacttcacctgacaaccgtttagttgaagtcatcgaaatcccagaaaacaaattcttcgtggctgcacaatatcacccagaattcttatcacgtccaaacaaaccagaaggcttattcaaagcattcatcggcgcaacaatgtaattaataaaaactcggctcatttgggggccgagtttttttgtccactgattcacaagggattcaatgtctgaattaattaaaaagttattgctataaactataatttgttataaaacgaatgatattctgagaatggcttgtaatttagcaattaattaattattattatacgtgtatgacttatttagaaacgatataacatgtttttaggtatgttaacaaatcgataatcaattaaataataaacttggaaagccaaaagcgtactttaagttgcaataacttagttaattagtcaacggaagtttgctcttttgttatgaatcgaacggagaaatctaaaaaatgaaaaaaatgttaattcaaggcggtaatcttctatcaggggaagtgacaattggcggcgctaaaaacagtacggtagcaattatcccagcagcgattttggcagaatccaaagttgttctggatagtgtgccgcacatcaaggacgtcaacagcttactatcaattttagaagatatgtcggttacttcaaccttcacgggcgatacggttgaaattgatccgacaaatattgtatcaacacctttaccaagtggtaaaattcaaagtttacgggcttcatattatttcatgggggctttgttaggacgttttggtaaagcaatcgtgggcttgcctggtggcgatgatatcggaccacggccaatcgatcaacacatcaagggtttcgaagctcttggtgcggtggttaccaataatcatggggcgattgaaattaacgcaccagaagggttacacggcgctaaaatttatctagacatggcatcagttggggcaaccattaacctattattggctgctgttcgtgctgaaggtcaaacagtcattgaaaatgctgcgcgtgaacctgaaattgtcgatatcgcgactttcttaaataatatgggtgcaaaggttcgtggagccggtactgatattattcggattgaaggggtggcccacttatacggtcacaacacacatacgattattcctgatcgaatcgaagcagggacttacctcagtatggcagctgccatcggtgacggggtgaacgttaaaaatatcattagcgaacatatggatgcttatcttgctaagttagaagaaatgggcgttaagatggatgttaaagaagacagtatttttgtttatccatcacctgatttgaagatggtacaagtcaagacaatgccatatcctggttttgcgactgacttacaacaacccttaacaccacttttattgaaagcacaaggtgaaggcctagttgttgatacgctttatcctaaacggacgcgtcatgtcccagaattaattcggatgggtgcggatatctcaatcgaaaatgatgttatcttattgcaccatgcggataaattgcaaggtgcagaagtatcagccgatgaaattcgcggtggcgcatgtctaatgatcgcgggcttgatggccaacggggtgacaaccattacgaatgcaagtaacattttaagaggatatgatcgcgttattgataaactaacgggcctcggggctgtcgtcaaaatggttgaagaataaccgcgaacgtctattgttttttgttggcattcgtgctaatatttaatggttatgtaaacaaatatctctgacatagtaaatatctcagggcgaaacttaagttgagtgccatttcggtggcacactaactttagtaaaaaggagcggaaaagacatgaaacaaggtattcatccagattatcacaaggttgtatttatggattcatcaactggcttcaagttcatctcaggttcaactgctaactcagctgaaactgttgaatgggaagacggtaacacatatccattaattcgtgttgaaatttcatcagattcacatccattctacactggtaaacaaaaatttactcaagcagatggtcgtgtcgatcgtttcaacaaaaaatatggttttgcagacaagaacgctgccaaataattattttggaaccggggaatttttccctggtttttttttgcacaaaaaaaggcccgattggacgttcaatcgggccttttgcggttatttaatgtgtaattgctgaattttatgcgtaccgatacaagctattagaatgattgggaaaaattgaagcggtaataagaagagtaataatgtcgccgtgacgtacggttgcgctacgatgattgtacaactgacggctactacggttgcaacaagcaatccgggggtgtaggggaagaggaccgccaaacttaagccaattgctgcactggcgaagatggctggaaaaattttaccaccgcgccacccgaaagcaaagatgaggttggttaaaactgttttgccaagtccgattaagagtaagtagccaaacgattgatccaagccggatttggtaaaggttagtaaatagtgttctccggaaaacagtaaatagggggacaatagaccgcaagcgcctaggcaaataccagcgataacggcgagtaaaactggtcggtgaatggtgtcggcaagccactgacaccattgttcgatttttaaaaatagattgccaaaaacgaatccgacaattaatgctaaaataagtaatggccagactgccaatgtccaatgaatggttggcgtgtgtaaggcaaacgggctttctttggggaataattgattgactaaagtaaaaccaagtaaccccgtggccgtcgttagaatatataatagcatttggttgaaatgggatttaaagtgttcgcgaagcggcgttttttcaatagcctcacccacaccagcgaatggggcgtggaaaatagtagccagcattgcgccaattcccatatttaaaaatagtgtttgttggtgggctgttaatttaagacgatcacccaaccatgtgatcaagccgccgacgatagctgataatgctgcttcgggccctaaactggcggacgactaaggccgcaatgatatttttaccaacttgatgctgataggcaacggcgccggtttgtttgaattcgctaagtgtttcgtgcattgttttcggataaggcccccaagaacgctgcattaaaccaacgaggatgccaccgaataatccgatgactaagggataggcaggatggttgaaatgtgaataaccaacttgccaaataaggtgtgtgctgaggttgataagcgctaagaaggcggcggctaagccaccaattaataagcctaacagtaagctgtatagtacaaagataagtttaaattgcgtggttttagtggtcgatgatggcataggccctcctaaaaatgggattatttatgcactattatgcactaaccacgtgtatttgaccatagtggaattgtgattaatcatggaggagaataataatgaaaattgatcggctacaagcatttagtgacggggtttttgcgattttgctgacactgctagtgttagattttaagttgcccaactacaagattgggcatttggggcaagctgtaatcgcgcaatggcccattttagcagcgtatatgttatcatttttttatgtaggaacgttatggttatttcatcatgactattttgctaaaattaaacggacgaattggcaactcaatatcttaaatttgattctattgtttgccatcacgctgattaattacccgacgagtctgttatccgaagcagttgcgcaacgaaatttagcggatattcgctttgcattcacaagttatgcactagtggcgttggtgatctcgggtctattttgggtattgtatcgtttcatggcggtgcatcaagatttgatgatccaccaagaacaacacgaacaattctaccgagccattcgcaatgatccactacggagtgtgctgatttacgtaattgcattggtggggattcagtttaatgtcgttgtcggggcattattaatcctcctggggaacatcttccactttatcgcgtatttgcgtttgagtcggaatattgaaaaacatcatttaattgaataaggagtgataaaagtggcaaaacgaacacaaaattggcgctgggtcgattgggtctacgtcttcacgattgcgagtcatttgctatatatcggaattgctttagaagaaatgttaaatcatcccgatcaaaatgcgggtttagcctttacgatggttcaagttgttggggggctagtcattgcgaccttaccaattatcttggaacggtttatgcgttatcgattcccagaaatattatatgccgtttatttagtttttatctattgttcgattttattagggaccgggttacatttttacagtcaaatctattattgggataaattcctgcatattttaagtgctggtttgttggcaggcttaggttatacgattttttcagccttgatttcgagtcatttacgccaaactatttcaccattattgatgagtatctttgctgcaacattcggcagtacaattggtgttttctgggaattctacgagttcacaggtgatcgcttattaggtctaaacatgcaacgttttatggcaaatggccacttactacgtggacaagcggccttagttgatacgatgggcgatttgttagcagatgtggtcggctcaattttaatcgcaatcatcggttatttctgtattaaacataaccgggaatggctaaataaattaacgtttaccaaaaaatagagcgattaatcaaccgttttgactccgagcagttgcctagttgtgcaaataagcgacgtcagtcgattgtttgtgcgacgtagcaaggcacaggagtcaggttgagtaaacgcgtttctaaaagtaaaagggcgctaagacaaaagtgattttgtcttagcgccctttttattagtcaaatttttatcggctaaacgtgttctatcagtcatattcttgcggttaacgccgaatgtcaaacgattgctgtcagcaatcattcgccactctctgttaatcctcagaatatcttcgactgatggcacactctttttattaagatgtttttttagccgcgtccgctcgatttttacgaagaacacgggtattttgattgacccaaaagaggttaatcacgactaagacggtggtggaaatgaagactccaccataaccgaaaaagccagaaacgcttgaaccaattagtggtccggcaacgttgcccattgcttggaaggattggttataactgaaaatacggccggcggaattatgcggcgagtatttggctagaatggtttgaacttgtggtaataaagctgcatcggcaatcccgacaagcagacgcaaggcgcctaattgccaaacgttttgaacgaacgcttgggggatgtagacgaaaaccgcgaaaatcaaaccaccaatcaggattttatcggacccgattcgatcaccgagggcgccaaagcgcggtgcggcaatcagggtcgcaatccccggaatcgcggcgacaatcccgctgactaacgcgacatttttaccatggtccattaattggcgaacgtataaacttaacaacggactaatcgagttgttggaagcttgaataatcattgttgtgacaaacatcccgataattaaatggggatatttaagattttggatcagttgtttaccgggaacttgatcacctttttcgattggtgtgaagttttcatgaacgaaagctaaacagagtaagaagacgacgaataaaatggttccggtaatgaagaaggtcgttcggtaaccagtcatttcagcaacaacgccaccaagtagtgggcctaacaaagtcccagaaacggtcccagttgtcagggttcctaaggcttgaccactcttttcttgaggagcggaagttgcgatgagggcgtttgagttactgatatagccagaaaataccccttggagtaatcgcagtgcaatcagctcgtagacgttttggactaagcccattgcccctaggacaatagccatcccaagcgaagcacggagtaacattaatttacgaccgcgacgatcggcaattttgccccaccaaggcgagataatagccgttactaagaaggtgatcgagtaggttaacccactccacatactcagttgtgcggcggaaaaatcacctaacgtatctatataaagtgacataaagggcataatgaggctaaaggcaaccccggccataaaattcccaaaccataaaacaacaaggttttgctcccattgttctctgggtctgaataaacgttgacggatatgagtcaacatgaaacaatcatctcgattctaatgagttaaagcggcgaccattgcttttgataagcttggtaagtcgctagtagtgcaggttgttgtgcaaaaatttgtgccaactgttgactcttagcttgaggcaattggcgtttaaaatataaacgttgtgtatggtaggcatctaatgcgcatttttgctgttctaaggtaccagattgcgcgaaaaagagtagccagtctaaataccagtctttagggctatcagcctcataaagcgctagtagcgccattaattgttcagcaggtgcaattaataggtagtgattacgttgcaacggcgtcagcgtcaagtcatcggtttcaggaacaacaatcggtttggtacctaattgtgcgagaaactgggaaaaagaggacgcaacagtcaaccactggtcaacttcggtatcaatgtagcgaatgctgggattatcaggtgattgttgataatcgaacgcaaaatattgcgtaccgtgttgactaaatggtatcaaataatcaggccattgcgccacttctatgactgcttgtgaacccgttgcaataccagcgagataatgacactcaacgtggtctaaaccatcactagtcggttcgctagtgggaaggctaaagcggcttaaaaacccaccgttagtctcttggcatagtgctaaataatccgctggtaaagctgcgttaggtttgataaatcgcggatcaatcagcccgctatccgcaattgttgggtgtgcagaaaacatgtgagaccttcctttgctaatagggatatctctctagtttaccactaatcggcgatagttttgaattttgttaagaataataattctgctttatttgtgaataagagtctgctactatgaagacaatatcaaaagaaaagaggattagtttatgctatggttagttgtgattattatattagtattaatcgttgggaccgttgcgttttacatcagcacgtataatggcatggtcaaaagccgcaactgggcggatgaatcatggagccaaatcgatgtgcaactcaagcgccggaatgatttaattcccaacttattatcaacggtgaaaggttacgctaaatacgaacaagaaacatttaccaaagttgtagaaatgcgtaatcaattattagaaatgccaagtgatgatcgtcaagcaacgatggctgtttctaatcaattatcagaatcattgaagagcatcttgtcattaacagaaagttatccagatttgaaagcaaatgcggaatacatgaagttgatggaagaattaacgaatactgaaaacaagattgcttacgcacgtcaattgttcaattcaagtgcaactcgttttaacaataaaattgaaactttcccaggcaacatcatcgctggggcacataacttccaaaagacggcttacttagcaacgccagaagttgaaaaagaagtgccaaaagtttctttcgattagagtgtgatctgaaatgttatatgaacaaattgcacagaataaacgacggaccgtctatgtgatgattggattcttgatgcttgtactcgcaattggtgcggcattaggctatctcttcatgcaaaacaccttgacgggtgtgatcattgcggcggtcttagcggccgtttatatggtaatgatgattagtaattccactaatgtggtcatgcagatgaatcacgcgcacgaaattaaagatgccagtcagtatccagatttatggcatattgttgaagacatggcaatggtcggtcagattccaatgccacgggtttttatcgtcgacgatgatagtcccaatgcttttgcgacaggtaatgatcctaaaaatgccgcggttgctgtaacgtccggtattatggcccggttaaatcgtgaagaattagaaggtgtgattgcccacgaggtttcacacatcaagaactacgatattcgcttatcgacgattgctttggcgttagctgcggtcatctcgttacttgttaatatcgggagtaatatgatgtggtggggcggcggtcgtgatcgcgatgatgaccgcgaaggtggcgcaggcaatgtgattgccttagtcttttcaattcttttaatgattctgggaccattagcggctagcattgcacagatggccttgtcgcgaaatcgtgaatacttagcggatgcttccggcgttgagttgactcggaatccagaagggttaatcaatgccttattgaagatttctaatagtgaaccgatgcaagctgcggatccgtctagcgcggcgttgtatatctcagatccgtttaagggtcgcggtagctttgatgcgcatttatttgatagtcacccaccaattgaacaacgggtcgaacgtttacgtaatatgtagtagttattaattagcttaaaagagactgatcgcaattgtttgctgaccagtcttttttgtgtgaaactttcggcgtctgactgattaacgggtataatgaatgtaaggtggtggggatgatggttaatcaaaaattacgacgattaatgaatttacagacggtactgatcacgcaattgcaagatcgccaaacaacggcagtcatgcggcaaatgatacaacaacaattattgccacaagtacgtggtcaattgctgttggcgttacaggacaagcggctatttcaattgccaactgcaacccaaacaaagctggaacagttgttaattcagaatttgattgagcctagtaatggtgcggccttaagtgcgctttggctagagaaaacccaattacggtaccatcttcccaccaaaaacggactggtcgctcattttgcccagttagagttggaaaactgggatgataacagcttgcgggcttatgcggccattatcaggcagcaagaaccgttgtttaatctaacggctgccaatcgtgcgctacatcgcgtgggctcaccactttatcagcagttatatcaagcctatggtggtcggacaacgaatcggttggttaattggcaacgagctaatttagttttgatgcagttgggtgcacagctagatgcgcaccattttttacaattaggggcagaagattttgaaatctattcagaaatgccaccggacgcgccatttttaaagacgtttgcgcagagtgttcaacttgcttttaaagaccaggatttgacggatcagcggctgcatcaatttagaatgtatctggatcggcaaaatattcagtatattcgaacccattttaagactgccggtgattctgatgaaatggcactccaaaaattcgtcgcgcaacggcaaaagaagcagcgggcgtattggttgaaaagggaaccggcccgcttgcataataaatatatgcgcggtgtcacttttaatgcggatgctaacttgaatcgtaaacggttgacgcctgattttcatagcgaatttatcattgatcgaactgggcagtttgtgacgcagtgggatgtgttacggtatcggacacctcatcaaattgaaagtgatccggcacagtatgtattgaatatcgccgaaaaaaatgcgttattaaatggcgaatctttcaactatgctaaccgcaataatttacaacatgcccaactggatagtcgaccgccacgccaattggatcatcaattacgcgaccgggcctttgccggctggcagagtcctaataaacaacaatatcggcaatcagcagaaaaaagtgatgcctattcacgaccttattaacggattggtcggctagaatctgctgttggtcttttgaaaatttatggtacaatgttgcgtagttaaccacgcgaaatagtcgggtgggctttttataagaatcataaaaataagattgaaagcgtgggcttttgatcactaaccaataggagctatttaagatatgaaaatgcaattgagcgaaattgcacggatgactggtgcgaaaaatgagactgaacaatgggcgacagtagaagtgacaagtgttgcttttgatgcgcgtgaattacggccaggggcgttatttgtcccactagccggtaatcgggatggtcataattttatcaatcaagcacgagaaaacggtgcggtagcgacattatgggccagtgcacgtgatgatcaaccaactgattttccagtattacttgtgaaagatccgctagcagcgtatcaacaattggctaaacggtacttactaaagattaatcctaaagttgtggcgattactgggagtaacggtaaaacaaccactaaggatatgacagccgctgtattgggcagtcaatataatattcataaaacacaagcaaactttaataatgaaattggtgttcctcagacgattttgtcaatggaagccaatactgaaattctcgtcattgaaatgggaatggaccgccctggacaattgcacgctttaagcgaaatcgcaatgccagatgtggccgccattaccatgattggtgaagcacacattgaatttttcaaaacacgggataaaattgccgatgccaagatggaaatcaccgactttttaaaagaagacggcttattggtttatgatggcgacgaaccactcttaaatgaacgcgttggcgatttggaacgtgaaacttttgggagtgcgacaaccaacacactttatccaattcaagtccgtgctggtgaaacgaagacgcaatttaagttgaatgcttggccagacgtcgcttttgaaattccaatgatgggtgcgtacaacgtcaataacgccttagccgctattttaattggccaacattatcacattaaaccagaagtgatgagcaaggcgttagctaattttgaagtaacgcgtaaccgaacagaatggttggtcgggaccgcagggcaaagaatgttaagtgatgtatataactcaaatccaacagcggctatcgaagtgttacgcaattttagccattttgaaactgatgggcgccgaatcgccgtcttaggggacatgttggaactcggaacagctagcaagaaacttcatgagagtttggcaacggtcttagatcctgctcaaatccaagaagtttatctatttgggacggaaattaaaccactattcgataagctcgcaacaatttatccagcagaacaactacactactttgaaaaaacacagcaacctgaattaattaccgctttagcagaaaccatccaaccatccgatttagtcgtcttaaaggctagtcatggcttgcatttagaaaaagtagtggctgctttgacgactgagaacgattaacaaggcaaaaagaattttagctgattcatttacagcggtagagtcgggttcgcacgactaattaacgtcataaaacaatgaatatcacccataatcgggttaattccgtttgctaattaatggtgagcgtgataagctattaaggagcttttttaatgaaaaaggctcttgaaaacaattatattacaagacagatttttgaaaatggtgtaactgatgaagtggacctgttttgtaatggcatgttttttacaaaacaaggaggaacactatttgaaattctcagaattaggtctatcagaaccaatcatgaaagcaattagccgcgcaggctttgaagaagcaacaccaatccaaggggaaacaattcctttggcattagctggcaaggacgttatcggccaagctcaaacagggactggtaaaacagctgctttcggtttaccaatcttacaaaacttagatttagataacccggatatccaagcattaatcatttcaccaacacgtgaattggccatccaaacacaagaagaactttaccgtttaggtcgcgaccgtaaagctaaggttcaagttgtttatggtggtgctgatattcgccgtcaaattcgttcattaaaagatcacccacaaattcttgttgggacaccaggtcgtctattggatcatatcaatcgtcggactgttaaattagatcacgttaaaacattagttttagatgaagctgatgaaatgttagacatgggttttgtggatgatatcgaaagtatcatcaaacaagtacctgaaaaacgtcaaacattattattctcagcaacattacctgcaccaatcatgaagatcggtaagagcttcatgacaaatccagaaatgatcaaagtgaagtcaaaagaattaactgctgacttaatcgatcaatattatgttcgtgctaaagactttgaaaaattcgacattatgacccgtttgttcgatgttcaatcaccagaattaacattgattttcggccgtacaaaacgtcgtgttgatgaattaacacgtggtttgaaggctcgtggctacaatgctgaaggtattcatggtgatttatcacaacaaaaacggatgagcgtcttgaaatcatttaaggctggccgtttggatgtcttagttgcaacagatgttgctgctcgtggacttgatatctctggtgtaacgcatgtttataactacgatattcctcaagatccagacagttatgttcatcgtattggccgtactggccgtgccggtaaatcaggtgtttcagttactttcgtgacaccaaacgaaatggaatacttacggattatcgaagaattaacgaagaaacggatgttacctttacaaccaccttcagaaaaagaagccttcaagggtcaattagcagcagctgttgctgatatcaactcaatgattgaaaaaggccaattagctaaatacaacgaagaagctgaagaattattaaaacaattctcagatgttgaattagcttcagttcttttgaagacaatcagtaaagaagccgttccagttaagatcacaccagaacgtccattgccttcacgtaaaaagggtggcaatcgtggcggaaaccgcggcggcagtcgtggtggtaatagcggcaatcgtcgtggcggtaacggcggtggttatcgtggtggtaaccgtcgtagtagtggcgatggcaaacgtcgtggcaacgacagcagcaaagatggccgtcgtagcagcagtaacggtgatagcagcaaacgtcgtagtaacgacaatcgcggcgacagccgtaagaagactgatggccgttcaaaacggaacttcacaattcggacaaatgataaataattaacgtttaatagcgtcctaccaattttggtggggcgctattttcatatcatgatgtgacagagctgtaagttttttccgcatcggctttgtggtaaacttaatagaaaataggctactaggggcgaatactgtgatagttggattaggaattgatttggctgaaatcgaccgatttgaaaaagcacaagagaaaaatagtcgttttgctgaaaaagtattaacggcaactgaatttgaactttttagtcattatactggtcgtcgggcactagaatttttggccggccgttttgcagtcaaggaagcctttagtaaagcttatgggacagggattggccaggtaaaactgcaagcagtggaaacgctgaatgatccccagggcaaaccgtacatcaaacaagatttatttgatggtgtggttcacgtctcgctttcacatacagcaacactcgtgatcgcagaagttattttggaaagaggttaagacatgacagtcggttacttacgaccaacacgcattttagttgatcaaaatgcaatttatgagaatattcaaaacgaattaaaacaccttgaaggtacagataccgtgatctttccggtattgaaagccaatgcttacggtcatggcctcataccagtcgcggaggccgctcaagccgctggtgccgctggcttttgtgtggcgttattagacgaggctttagcgttacgtcgggctaatttcacagaaccaatcttggttcttgggattacacaacctagtgaaattgaattagctgctgctaatcaaatttcattgacagttggttcactcgaatggttacaagaagcgactgcaattgcccaacaggtaccttatctccatccagtgcccatccatttgagtatagacagtggtatgggtcgaattggcatgcgcgatgaagctgagctcttagcggcttatacctttatcaaagcacattctgattatttcgatttcgaaggggtattcacgcattttgcaacagccgatgatccggatgatacttatttcaaggaacaaagtgcacgctttaatcagctaatgacggctttaccggaacggcctagatttgttcatgtttctaactcagcaacgagtttatggcatgcggcatgtaatggtaatattattcgaatgggcattagtttatatggtcttaatccttctggtaatgcgattcctgatttaccttatccgcttaaaccagcacttgggattgaatcagaattggtctttgtcaaacaagttgcagctggcaccaaaattggctatggtgcgacttatgaagcattcaaaggtgaatggattggtacgattccaatgggctatgctgatggctggttgagaagaatgcaaggttcaaaagtcttggtagatgggcaacgttgtgaaattgtaggccgcatttgtatggatcaaatgatgattcgcttgcccaaacgttatccagtagggacgaaagtggtctttgttggtaagagtggcgacgatgaaatcacactacaagaagtggctgattatgctgatacaattcactatgaaattatctgtgatttatcagatcgaattccccgtgtgtataccggattaaatgaacactaacgattaacaattttgcttatcttcatttctgtgttaggataaatacaggttaaaaagtgttgatttcggaggctgatgaagatggaagctaaccacgaacaattatccgttaacttagacgttaaattagtacaagagattaaaacctattgcgaggtttacggccttgatgagaatgatttgattcaagatgccatccatgaatttatggcaacccggcaagcgaaggttgataacgtcattaacggctatgtcgaaatggccaatcttaatagtcaaatcgccgctgaattcaacgcttgtgaaagtgaggcttacgcccgcattcgcacagttgatttatcctaattggagggatagaagtgggagaattgatacaacgcggtgatatttattatgcagacttatcaccagtagtaggatcagaacagggtggcatgcgtcccgtgttaattattcaaaatgacgtgggcaatcatcatagtccaacggtaatcgtggcggctattacagcgaagattcaaaagcctaagttgccaacacatgttggtatcacagctaaggccaatggtgttgagcgtgattctgtcatcttgttggaacaagtccggacgattgataaacagcgcctcaaagacaaggttacgcatttagttgctgagaagatgcgtcaagttgatcgcgcgttaacaattagcgttgggctccaacctgttttgaatccttaatacataagttagtgcgagagtctcagacaaggtgtctgaggctttttctttttgatatcgagtgttcagatgtgctatgatagtaatcgcattgaaaaaacgtggttcgtaaccatcccacgctaaaaaactaggaggattattaaatgactaatcaaaatcgcttgcgtagtgtgatcttaaatggcttagtggctgcgctatacgtggtattatcactatttccaggggtactgggccttgcttctagccccattcagttccgggtatcagaaggcttaaaccatctggttgtcttcaataaaaaatatttatggggcgtttttgggggcgtgcttgtcttcaatttcttctttagctctgaaaataagattttggatacgttatttggcggtggccaaactctgttagcattacttgttttaacgcttgtgatgcctcatttgaaaaaaacgtggcaaaaaatgttagttaatatcgttttattcacggtatcgatgttcatgattgcttggatgattgttttaactggctcaacggctaaaacgcaaatcccattctggccaacgtatgccacattggcgatttctgaagctgttatcatgacgattaccgcaccaattatgtacgcggtcgatcaagtcttgcattttgaacgacaaatttaatagcaaaaaaaacggcgctaggacaaaagtaattttgtctttagcgccgtttttgctatccgaacattgatggtgtaaacgtgctttttgaaactgacttctgcgcttagcgtcactcgtcaaacaactgcttgcagcagttattcaccgagctgtgctaatgctcaaagtatattggattttggtccaatatcgggggttcacttcatcattgatttttcaatcgtctggttatttttttgcgcaatcaaaacaaaaaacacctcatcgattatccgatgaggtgtttatctgttatttattaaggagaatgagagattcgaactctcgcgtgggcagaacccacctgacggttttcaagaccgttcccttcagccagacttgggtaattctccatatcaatatcttacaacgtttattataataccaagtctgacaattaatgtcaactcaaatttactaagttatttaatttttttcaatccggcttaaatccccctatttacaggaggctatcaacacgttattatgaaatggtgcatttgaaatcaagcgcctaagccccgcttggactggttcggaaacttcccagaataaaaaactaaggatctcaaggaggttagaaataaatgcaaactcgcaaaattattattgattgcgatccaggcatcgatgacactctcgcgttgaatttggccattcaatcgcctgaagtagaagtcgttgctttaacgattgtttgcggcaacgtccccgtcgaaattggcgtcgacaatgcctttaaatgtctagaacgactcggtcgactagatatcccggtctacgctggtgcggcccagccgctcaagaagacctttgttagtgctcaagatacacatggtatggatggtttgggcgatagtcatattccccgccaaacgactaccaaggccgctgagcaatcggcagccgattttttagcgacgacttttaaggcaccttgtgatattagtattatcgcactcgggccactgaccaacattgcgaccgcgctaacattaaatccccaattgggggccaattgtgcgcggttcgtttcgatgggtggcacctataaaagtcatggtaattgctccccagtggcggaatttaattattggagtgatccggaggctgctttggcggtctatgaacacctcaatcagaaaatcgaaatgattggcttagatatcactcgtgagattgtcttcacgcccactttgttagcttattgtcagcggatcaatcctgaagttggtgactatttagccgctattacgcagttttattttgatttccactggcaatatgaacatatcatcggctgtgtcattaatgatccgctcgcagtcgcctatttcatcgacccgacactttgtcagggttttgaaagctacaccactgtcgaaacaaccggcatcagtattggccaaacactggtggaccgcttcgacttttggcaccgtcctattaatagcctcattttaactgaggtagatacaaatcgtttctttgaacagtttttgaccgtcgttttaaatgcacaggcttcaatcattaaaacggacttaaaaaaactcagataggaacaacctttaatgaaaaaatttaaaacgcgccatctaacaattatcgccttggcaatcgccttaaattacgttggcagtaacattgcgctcgtcttacggttaccaatttacctcgacagtattgggacaatccttgccggtgccttactagggcccttagctggcgcattaacggcgactgccagtagcgttcttagtggtattacgactgacttattcgcgctatactatttaccagatggccttttaaccggcttactagcaggttggtttttataccaacatcaacgtagtaaacgcgaaattccgttagttgccattggcgttgctttgccgggcactgtcgttagttcactgattacttatttcctattccacggtattacgtcttcaggttccagcatgattgttcaactactcagtggcctcggcctcaatcaattcgcgagcatcacgcttgtccaagccggaactgattacttggaccgtttgttggcaattgtgattgtgacccaagtttgttaccacctcaaaaagcaaattgcaacactctagaaactaaaaacaaggcccctaaaagggaccttgtttttttatgcttgcattaataacttcacgtaacgttctaagtattcttgatcaactgcatcataagcgccgacttcgcggctatcgagatctaaaacgccgatcaattgcgcgtctttcatcattggtacgacgatttcagagcgagctgttgagtcgcaggcgatgtaattttgatgtttcgtcacatccgttacaatcacagtcgcttgttcagcagcagcttcaccgcagacgcccttgcccattgtaatatgcatacatgagacattgccttgaaaaggccctaaaactaactcattatcttgatacaaataataaccggcaaaaactgtttctggtaacgtttggttcaacaaggccgaagaattagccaaattagcaattaaatttgtctcgccttctaataatgctgcttgttgcttgagtagcatttcgtaagcgccacgcttagcttcagttgatttaaataacatctcataaccttctttttaggctattataatcaaaattgcgtataagcgcaattttttaacattttatctattatgttcatctgcaaatttagtatctttcattgctaatgccgcttcttcggttggataatagtgtccatacgagcttcgactagcggtttcaagtattgataacactggcatactcttgccattaatatccctatccttaacaccgtagagcagtcctgcaccattagtttgataccatccgtgaacggttaaccattcccgaccatcaaaattaatcggatcaactcgtccccaattcattttagcggaattgggtgtggtctgattaattccaatagtcccgtttactaacccacgttcttcagtattcatttccgaactactgtgtaactccgttgtatgatcaggatcaatcatcttattgccagctatttgtaatttagtaatttcaccagtcgcatcactactataccaagttccctcgaacgtagctggaacttgataacccgcttgcttcgtattttcttttacatcactcgctgctttggtactttctgaagttgaagttgccgagccaccaccgacaatttgcgcaaagttttgttttaagtcagtattggctgtttctttgaaatgcacaagaccatctggcatgccttgattttgttctgtaatcaagaccaccggttggccgtcatgaatcgtaaatagatatagatgagccgacatatcgtgcgcagccgcactgtctgaataaatccccacgacattgtaatcgttgctgccagtcccgtctgctgaccaatcagctgtcacgtgttgatcatcaacagctagtttgtcttctttaaagtaacttggataattaagcccaaagaaatgggtttcattacccggttgataatccgcatattgttgattcatcgcttgactaaaactggccatataggtcttcaacgcttgtgacttggctgatgaccagactgccttatctgaagacgatgtttgtgttacttgtttacgactcacttttttagccgagctagtcgttgttttcttcgccttttttgatgttttaacttgttgactcgtactgctgcttttggctgttgacttaggtccttcaaccttttgactgcaccctgctaataataagagcgccgctgcaccaaataataccccttgctttttcatataaactcccccattgtacttgaatatgataacggttttattatagcatattatgcaaatcttgctttttttgaccacaaaaaaagccgccttcttcggcgactttcttcatgattaacggaactgctgaatgcgttgtggcaatcgtgcaatcactgccacaatcagcccactttttaatatttcaattgggacatagggcgcaaaaccagttaagaaactagcttgccagcctaaatgaagtgctattctcaaccacaacgtgccaattaataactgacagaggctagcgagtaaattaacactaaacatcacgcgccgtgaacggccaaaataatgcaaaccataatgcacgatgccaatatagatgataaagccaaataaataaccacctgtcggcccgacgataacactcgccccaccggcaaaattagcaaagactggtaatccaactaatcctagtaatagataagccgcaatgaccgcactactcaactgtaatggtaagacggttgcaatcagtccaacagctagtgtttgaagtgtaatcggaacaatccaaatcggaatactaatctgggcacaaacaattaataaggctagacatacgccgatatagcttaaccggcgcgcaactgatactgacatcgcaattcctcctgctcattaatctgcaaaccggactcgttgtccaattcgcacgatttgttgattacttaaaattaatgtaccatctggtttgagtgcactaacacttatatcttgaactggttgtccggcaatcgtttgaagcttacgaccaaccaaaggcgtccagcgctgataacgtcgtgttagttcaagggctggtaattgtaagagtgtatacaatcgattgagatactgggcactaaattggttaatcgtgacttgctgtgccactactagcgcccgcaagttaccaatgtgttcagtttcaatcgttgaggcaaaattaagcccgacccccaccacaacaccacttaagcggccggtgacatccaggtagccctctgttaaaatacccgccagtttttgctgctgatcatagacatcattgacccatttaagctgaacttcataatgtaataaggcttgaattgtctcagcaagtgcaacaccagctgcagccgtctgttgaaaggtattaaactgcgcggaatctctaactggcatcaaaagacttaaataaagaccaccaatcggtgatgcaaattggtggtctctttgcccgcggccctgtgtttgttgttgtgctatcacgactgaccattgctgatcacgcattggctgttgcaacaaataagcgttggttgatggtaggacttgctgaactgagagggtgagcaaatcgcgtagttccggggaaagtacccgctgtatctgcgccgcctcgattgtcattaagtctattgtaaatgaacgcctttgtcaacgtagataatgtcaccagtcacaccggttgccatatcactgagtaagaacccagcgacattcccaacttcttcaatcgtgactgattgaccatcaacagttcgtttttctgattcttctaataatgaacggaaatctttaaccccggtcactgcgagtgtcttgatggcccctgcagaaatggcattaacgcgaatttgatcagcgcctaaatctcgtgctaaatagcgaacactagcttctaatgatgctttggcgatacccatcacgttgtagttaggaacagcgcgttctgaaccaaagtaagtcattgtcacaatgctaccatttggttttaagaggtcacgaccatatttagcgacggcgattaatgaatacgcactgatttcttgggctaataagtaacctgaacgagatgtttcataaaccttaccctctaactcttcacggttggcataggcgatcgcatgaacaatcccatcaatttgacccactttagctttaatttcagcaaaagtttgttcaattgcggcatcatcgctgacatcacattcaaccaataagcttgtttcggggacaaattttgacaaactatgtttaattcggtcgttttggtaggtataaataacctccccaccagcttgtgtaattgcttgtgcacatccccacgcgatacttctttgattagcaacgcccatcactaggattttctttccatttaacacgtttctgacactcctttttttcgttaaaattgcctaaatctggcttgtcgagtggccaataaagtctcgacaggtaattgttgtaattgatttaattgttcggttaagacggtggttatattttgacagaaaaggtgttcatctggttcttcttgaataatcccttcaatcacaccggcatcttgtaaagattggggtgttaattgcatgattgccgccgcttcatcagcgcgctggctatctttccataaaattgaagcaaacccttctggcgataaaatggaatacatactctcagtggtcatccaaacttgatcgccacaggctagtgccaaggcaccacctgagcccccttcaccgaagattacgctaatcatcggtgttttcagagtactgatttcatataaattattggcaatcgccattccctgaccggtcgcttcagcgtgcgccccgggataagctcccgcggtattcaccaaagtgataatcggacgtttgaatttttctgcttccttcattaaccgtagtgctttgcgataaccggcgggttcaggacaaccaaagtgacacgccatacgttcttcaagtgttgtccctttattagttgcaatcaccgtcaccggttgattattaaataacgcgataccaccaataatggctggatcttcgccgccgactcggtcgcctttgagaatcattaaatcatcaaaaaggttggccaataatgccggtgtcgttattttttgactactacgggcgccggcgacaatcttagcggctgtctttttttgacgattaataatgagcccctctttcatgtaacttcaacaattgatgaagtacctttttttgatcctgacgtgctacgatttgatcaataaacccattttttaagacggtttcagcatcttgtaaatccggtgcgatctgttcgtgcatcgtctgttcaatcacgcgccggcccgcaaagccaatcaccgctttgggttcggctaaaataatatcggcttccgttgcaaaactagctgttaccccaccggttgtcggatcggttaataagctaatatacaacagtccttgttcggcatgctgtttaacagccgctgaggttttagccatctgcatcaaagaaaaaatcccttcttgcatccgagcaccaccagaagccgcaattaaaatcacgggtaagcctttttcagttgctagctcaaaaagccgtgtaattttttcaccagtcgcactacccatgcttcccataataaaataagggtccatgatacctaatgcgaatttttgttgtttaatagtcgcaacaccggtcagaatactatcttctagtccagtgatttgctgtgcttttcgcaatttctgcggatatttgggaaaatggagcggattaggcgtttgcgctagatcgccggctggttcaaaactatccaccaaccaatctaggcgaaccttagcccgcgtccgaaatccatattgacagaccggacaagtccggtaataaccaaggtccttatgataaatcgattgctgacacttaggacaggcaacccataaaccgtctggcaccttttgtcgtgcttcttgattatatttaagatgggctttaccgatattacgaacggcattgaataattgcatggtgcccctccttttaatctgttgctaatgacgttaaataatccgtcgtcgcttggctacttaaaaagaccggatcttctaataacgtttgttggaactgtgcattcgttttaatccctgagacaatcaactcgttgagcacccgatgcattttagcaatcgcaatttctcgcgttgcgccccaagtaattaacttgccaatcatcgcatcgtaaaacggtgaaattgcataaccactgaataaatgcgtatcgatgcgcacacctaagttaccagttggtaagtataaatagttcaccgtaccagccgatggggcaaagttattgtccggatcttcagcatttaaacgacattcaagcgcaaagccacgcgtttcaacggcagcttgatcaaatgataatggtgcccccgcggccaccaaaatttgttcccggacaagatcgacacccgtcaccatttcggttaccggatgttcaacttgaattcgggtgttcatttctaggaaatagaactgatgatcttggtccattaaaaattcaacggttcccgtattttcataattaatttgttcagccgctttgagtgcaattgcgcccaattcagcccgttcatccggggttaataaagccgacggcgtttcttcaatcaccttttgtttaaagcgttgcattgaacaatcccgttctgggaagtagacagcattgccaaagtgatctctaaaaatttggacttcgatatgtttaacgtccagcatgattttttctaggtacaattgatcattgccaaaagcaccagccgcttctaattgtgcttgcgcataactgtcagcgagttggctttcatcatcaacaaagcgaatgcctttgccaccgccaccagcgacggctttaatcattacgggataaccaactttagcggcgacgattttagcgtctgcaagactttttaatgggccatcactcccaggaatcaacggcacggcggccgccttcatactggttttggcctgacttttatcccccatctgcgcaatcacttggctagaagggccgataaacgtcacgccacaggcttcacacatttcagcaaattgactgttttcagatagaaaaccgtaacctggatgaatcgcgtcgcaaccagtcccaatcgctgcggataaaacgttttgcatatttaaataggattcttgtggtcgattaccgccgatgcagaccgcttcgtccgctaattgaacgtgcaaactacttttatcggctttagaataaaccgatacagagggaatgcccatttcttttaacgtccgaatgatgtgcaacgcgatttcgccccgattagcgactaatactttcttaaacatcgcgtggtgcctcctattcgataataaatgttaattctgcggtacaggctttttcaccatcaaccgttgcgatcgctttaccgaccccaatccgatcttttaatttttcaagtgtgactttaatttcaagtgtgtcgccagggcgaaccacccgtctgaatttagccgacttaacgccaccaaaaaaggctgtccgccctttaaattggtcaagcgttaataaagcgactgcccccgtttgggccattgcttctaaaatgaaaacacctggcaatactggattacctggaaaatggccttggaaaacagcttcgttgattgacacgtttttccgtgcaatcgcgaattcacctggttcgaaactcaatacgcgatcgattaataacatcggataacgatggggtagaatcgcttggatttcttgactatctaacatggtttagccttctttcactttaaatagtggttgttggtattcaactaattcttcgttttgaacgaggatttcagtaattgtcccagccaccgtacttttgacttccgtcatcatcttcatggcttcaatcacacaaacgacatcgccaaccgctacagtttgaccaaccttcacgaaagctggatcagcaggtgctggttgtaaataaatactcccaaccagcggtgcttcaatcgcaattgtgtcatcagcaacagccattggtgcttcagtgctctcagttggcatacttgtcattgacgttgtgggtggcactgacggcgctacaggtgcgtgttgcacatcttgaacgcctcgtttatttaaataaagtttgatatcacttgtttcaagttgcatttcttggttgcccgattgattaaacaaggccaccatttctttgacttcatcgtagttcatttaactaatcgctccatttcttcaacaacaacacagcgttatggccaccaaagccaaatgagttactcataccatattgtgcgtctggggcagctaatggtgtcttaattaagttcacgtgacaatccggatcagtattttgtaacccaacgttcggtggcaaagtaccggcttgtaaagcaccaattgtaacgattgcttcaagcgcaccggctgcccctaataaatgacctgtcatactctttgtactgctgacaggaactgttccttcatcaccaaaaacacgtgccaaagcagcagattctgctaactcattggcaaccgttccagtgccgtgtgcattaacgtaatcaatatcggccgctgtaatcccagcttcatcaattgccatttgcattgcacgagcagcaacttcaccatttggattaggcgatgtcatatggtaggcatcacaattggtcccgtatcctgtgacttcacctaaaatggtcgcatggcgtgcttgtgcgtgttcaagactttctaaaattaaagtggcgccaccttcacccatcacaaaccctttacggtctgcgtcaaaaggcaatgaagcccgcgttggatctgtcgcggttgataacgttgataacgccgcgaagccaccaatcccaatttcattgattgaggcttcagaaccaccggtcaccatcacagtggcccgattttctttaatttggcgataagcttcacctatcgcattagccccacttgagcaagccgttacgattgttgtacaaatattttgcgcaccgatttcaatggcgatgttggccgcagccatatttccaattgatttaggtacgaagagtggtgagatatgatcagcacccttttcaaccatacgcgtcacttgttcttgaatcgtggttaaaccaccaatcccagaaccgtaaatgacgcccatgtcggctggtacggtattttcgtcgttaataccggcttgttcgagtgctgctagtgcactatcaagcgcgtattgtgaaaataaatccattcgctttgcttttttcttgccgattcgtaatgccggatcaaaatcaagaacttcggcagctaatgacacacccgttgtggttgcatcaaactttgtaatggggccaatgcctaattcgcccgctagaatccggcgtgtaaatgtctcaacgtcgtttcctaaaggtgccacaacgcccattcctgtaattactactctcgtcatcttaatccctcacttatattgtcatcccgccatcgacagtcaaaacttgccccgtcaaatagtcattttctgctaaaaataaagcggccgatgccacttcttctggttgaccaaaacgctgtaatggaatctgcgtcataatcgcttctttaacactcggttttaagaccgccgtcatttcagtttcaatcattcctggtgcaatcgcgttacaccggacgttgcgcatagcgccttctttggcgacggattgggtgaatccaatcacgccagctttactagcggcgtaattggcttggcccatattaccgtgttggccaatcacgcttgaaaggttgataatacaaccactgcgttgacgtaacatttttttgaaggccacttgggtcactctaaaagtgccgaccaagttgacatcaacgaccgcttggaaatcttcaacggacatcgccatcacgagtttatcgcgcgtaataccggcattattcaccaaaacgtccaatcgaccatagcgttcaaaggtttctttcaccaaacgatcagcggtgtctgctgcggtaatatcgccttgtacgaataaataggtcacgcctaaatcttcgattgcttggacgagttcagcatccaatgctgaacgcgcattaagcacgagttgataacctgctgctgcaaatttgagggcaattgcccgaccaataccgcggctaccaccagtaatcacggctactttttcatttgaagtcattaatgtgcgccttctttcaaggcagccacgacagtttcaaactgtgcgctactgctaatattaaatcggtctaattgagggaccgtttgacgtgcaaacttgctaagtgcgttgcccggccccacttcaataaccgttgtcacctcttgcttagccaattgtgtcaggccagtcgcaaaatgagtaggttgatacatctgtgcggttaaggttgcttgtaagctagcgacttcaaaaggttgttcagttgtattactgatcacgggataaacgccctctttaaaagtgacttgcgctagtgcttgttcaaattggtgcgccgtttcttcaaataaagcggtgtgaaaggcccctttaacgggtaacggaatcactttaggcgctacttcaagcgtttcaaataacgttgttaatgcctgaatccccttttgagtcccaccaacgacgatttgtttggccgaattataattcgcaatcgccaccgtttcaccagtcttttgaatcgtctcgcaagctgcttgaatttgattaatatcaggttttaagatcgcaatcatcgcgccaggatgtgcttcaacagtcgcttgcattaaagcaccacgcttggcgactagcggcaaaccggtcgtcaaatcaaacatgccactggcaattaatgctgaatattcacctaagctaagccctaaggcaccagctgttgaaacccccgcgtctgttaacatgcggctaatcccaacgctcatggctacaatcgccggctgtgcataacgcgtttgacctaataaatcagcatcattcatgattttttgtaaatcaagttgtgtcagctgactcgcttggtcaatcgtgtcgcggtaaatgggataatcttgatataaatcattccccattccaacggcttcgctaccctgaccgctcattaaaagtccaattttaaccatcatctgtgctcctttagattgctaaatgtccattttgaaactgactcttgcgcttaacgatatttgtcaaatcagcgattccatcgccaattcgccaaatgcggttaatgctcagagtcaaaccgtttcaaacgcactctttatttgtttattgttttttcgatgtagtcaacaacgttttgaaccgttacgattgattcgtctggatctaatttaagttccatgtcatcttctaattggttcattacttcaaagatatctaagctatctgcatctaaatcttcacggatgttcgttgttggtgttacttggctttcttcaacgtctaattgttctgcaataactgcttgtactttttttaagatgtctgcttgtgtcatgattaaaaccccttataattaattaatttttttagtttatttttaataacgaataatttgaatgccgatggttaacccaccgccaaaaccacagagcacgcataaatcaccgcgcttaatttggtttgtttcgacttgttccgctaataatagtggaatactggcagccgaagtattaccgtagtgctgtaaattcattggaaacttggttagcggttgatccaacatgctagccatttttgtaatcaagcgtgaattcgcttggtggactaagaagtgatcgatttgatcaagtgtcaaaccggcttctaggaccgccgcttcgatcgccttaggcacgcgccgtgttgaaaattggtagattgctttaccggtcattttgaaaaaatcaatcccgacttgcgtttgaccaacctgcccgaaattaggccgtttaaccggtgcgtaacctgaaactaattggtcactttccgtaccaatcgtgatcagcttttcactgacccaactctcttggtcagaggtagtgccttgtaacaagacacccgcagcgccatcaccgaataaaacggcagtactgcggtctgaccaatcgagcattttggaaataacttcgccaccgatgaccaaaacgtaatcatctggtgtctgcacgtatcctcgcgcagcagataatgcgtaagtaaagccggaacaagctgcgctaatatcaaacgcaaatgcttggtcagcccctaatcgcccctgcacaatagctgctgttgaaggtgtgtaataatccggcgtcatcgtcgcaacgataatcgccttaatttgtgaaactgcgataccgctcttgtccaataacgtttgtgctacgcgtaagcataaatcagacgtattttccgtttccgaaatccgtctttctaaaatacctgttcgactttcaatccattcattagaagtttccataatggccgttaaatcgtcgttagtcacaatgttggcgggtaaagcacttgccgtttcaattattttaaaggccatttgttaacctctacttttttccgaggagatcatcacgcggggccacaacaaaggttagctccgcttcacaaaccatttgaccattaacagtcgcattggtttggacaactcccatattttcttttttcttagttaatttaaccgtgaagacgatttgatcaccgggccgaaccgtttggtggaacaaaacgtttttagcagcgcctaggtaagctgtcttcccaaagaattctggtgattttagaattaatattgaagctgtctgtgccaaggcttcaatcattaatgtatttggcatctgtggtgaatcgggacgatagccacgcatgaactgttcattaatcgtgacgttcttgattgccaccacttcttcaccaggtactaacgactcaacagtatcgatataaataatcgggtaccgatttggaattagcgccataatctcagttgtatttaagagtgtcataatgcctccccattgattatttaaaaatgtaatacggcgtatcgcatttccattcatgaacaataccatatgttttttttgaagtcaattcgactttaaaacatattttacgttgaaatatcgcataaggtggcggaaaagccgatttaacgcgatttgtttatgccgtatacaataaatttttaaaatgaataaaatacaaaaaaataccccaatcattcgggagaaaccgaaatggttggggaatcgtcttttatgttttggcgtttaatacgttaatgcttgccactgtttcttggtcatcttcgtgaagtgttcttttctagtatcatctaatagtgggttatacatttcatcaatcgtcaattctggttggaaacctaatttttcttgtgcgcgctttgattgttggttcccgtcataataaccacaccaaatattatcaagtttaagcgtttcaaaaccgtatgctaaaatcgcttttgatgcttcagggattaaaccttgaccccaatatgggacaccaatccaatagccaatttcggcatcattctcacccataaagggttggccaccaccatttttaactaattctaaaccaacactaccgattgcgtgttgcggtgctgttttcaaattaactgaataaattccctctgccattaaatagttttgaatgagttcgcgactattagcgacgctagtgtgcaccgaccaaccggcgatggggccaatcgctggatcctttgcatattcatagattgcttgatcatccgtcaattcaaatggtctgaggattaagcgttgtgtttcaagttgcatattactttgcctgcctttttcctagtattttaaccgctaagtgtttgccagggctcaaaaaagtaccccgcgtttcaatgccaattaacggtaagttttgatgagtcgtgatggctgataaggcgctatcaaattccgcgccgctagcggcttcaattgtcgtaaaatcataacaaccggcggcaatgtggtagtcgcttggcatgggcgttgcgatacaaatcgcataatccgtttcgccaatcacataatacagctggcggaccatcaaatcgggctgccaatcaattgcttcaactaccgataaatcaaaatcttgcgcaaatggtagccgttttaaaacgcgcaaatgaattgtttgattgacctgataagttgtgtcatgagtcgcttgttgtaattgctcatcaacggttcgctctaacgcttgtaaccgggcaatttcttgttgcagcgcctgttttttattcagaagcatcgtttgttctggataatccgttgttaaaatcaactttatttcagctactgataaatctaatgcccgcaaaaatagaataaacgataattgataggcctcggccataccatattgccgatagccattctcagcgattttcgctggcaataacaaccccttatcctcataatgccggatggtgtactgcgttgtcttaaataatttggcaaatgccgaaatcgtcaataacttttcagccatcttctcacctcacaaaaaagtataaaccctagggtaacccaaaggtcaagagagtgttattcacaccggtttacttttgaacatttacgctacttggcgaattggcgtcaaagacgccggtttgacaagtctcgtaaagcgcagaaagttggtgtgaataacacgtttccacaaaaaagctttacccctcacgtcagaccacttcaaacgcagttttagccacttctcgtccgttgacaatcagtgccacgttatgttgccctggatagtgtttccgagtcgtcaaatctttaaaattaatttgtcgttcaccacttagtccttggcgaccatcaatttctttttccgctagcttaaataacttacgcgactgttgaccattggccttcacataatctactgcgtattcaacccgaaccagtagcttggcttccggtctaaagcgaatctgatagtgaaacgctaatttatcaccaatggctacagttgtcgcggttgttttgatggttgctgatagcactaacgggtttgcgggactatcggctgcatacccaaataaggtttgaaccgtcaagaaattctttcgcaataacgtccggcaaccatgccgaatcacccagtcaaccgcttcggattctccctgccactttttagccgtttcaatcaccaattgtgggtggtccttagcgatatcgtttaaattattcgcgacgctgcgtcgaacgtatagttcaggatcatttttaagtcgttctagaatcgctaagaccggtgtcggatcttgtttaaataccggtaaagattctccccaaggtaaacgtggtcgacagccttcactcgctaaacgccgcacatgggcattagcgctttgcgcccattgtgtcatttggaccattgcgcgttttggatccgttaaaataaaagtccgaatggcgaactccgctgaagattgttgggtaaaaatctcaagtgcgtgcattgaaagcgcccaatcctcaggacgtgtgccataaacaacaacgaaatccgggaaaaaaagataggcaaagccctgacaatcaggtgccagttgttctaaaagtgcaatcgcttctgaatagtcctgtggtaagaattgaccgagtacgatcgcaatctgacgtgtccgttgtttcaatgttaaatcggcccaattatcagctagaacggccctcacaaattgttgcgctttaaagggccgataaacttcttgaacttgctgactaaaggtcgtcagaaatgcttctgtataaatatcttttaacaattcagccattagtaatgcctccgttttttcactttcttctatcataccgttcttaacggctaaaaaaaacgcccatcaatgatgtgcgttttttgcgatctaaattaaaatacctgccactttcacaattaacatcaaaccataaccgataatgattaatgcgctaaggatgttaacccacattaggaatttaggtgagaccttatctctaaaaatactaaacaaaatggcaatgccgaagaaccaactagcagtcgccgtcacaacgccgataataaatggtaatgattgactggcagtcatatcaccccgtaaggcccccagcatcaacgtgccatcaatcaaagcttgtggattaccccaaacggcaatgaaggctgttaaaattacttttttaagcggaattggctgtaatttaccaaattcgacggccgcccgcgcgctccgtaaaattgtatagccaatccacaaaatcaacagcccgccgacacccataatcgtatacttaataatctcattttgaataatcaacgcaccaatgccataaaaggccaccacggaaaagagcgcatcaaataaccaaataaacaaactatttaaaaccgcgcgccgtgtcgtatttgacaatgcattgttaaatacgaaaatattttgcatcccaattggtgcgacaaacgcaaacccaattagcatcccttttaaaaaaatcatccaaatcctcctctaaaatatcacgaaacagtttttatgcctaaaactgcctataaacctctactttatctgaaatcagcggtgacgtctagtcctttaatttaacttatcgtcattattcattattggtgttatcataatgaccgttattatctattcgattagtcaattgttagcgatataatttactacactacgttaactgtttttcttgtaaaaacgctttcttatcgatacaataaatattgaaaggtggttttaaattatggtcaaattaacgttattcgacaacacaaagatcgtcctcaaagacgatgacgtcctatgcggaacagcagcggatgcaccgcgcactaataaacttgctattagggactttccccatcaagatattgtcgcgttcataacgcatttcatcaaagaaacacctttatttatcgcaaagcgcaatcctgatattatttattcgagtgcggatattattgaaatatcaatccgttcataacccaattattcaaaaagaaccctcagttatggctaactgccaatattgagggctctttttttagaaataatctgagaaataaggttgttcaaccggaataatattctctaagtttttaagcgtttgttttgtggcttgcaggcgttcaattttagctaaatatgatgggcgtcgataactcatcaacatggtcgtcaacgtttgaatatcacaaacgaccttttcaccaaccggccgactcgtaacatggacttttccttgctcatcccaatagacaccaaatgtgccgttattccattcagctagtggatccgttaattcaatatggaatgcttgcccgtccgtttcaaacggataagcttgtaagaattccttagcatcaacaatccgcgccatgaaatagggtttgatggtctgctcaatgtccccatcatccaataggaacgtaattggttcatcttgatagagattgcccttaacgtggtcgaccattgaataatgcgcaccgataaagttccataaaccaatccgtgcttcttgattcaaataaatcatttctttaatatgaaagacttcgttagcgatccaataaaggacgtagccagttggttcttcgttttcatcataataaacgccggcaatccgttcttcttcgttttcccaacgccaatattcatcccaatttaactcattgcgaatcatagcgccatgattgcgaagcgcgaatttatcatacatcataatcacatcagcatcatcaatgtccaaacgttcaacatgcccgttaacgggttgttgctttggtaattgactgtcgcgaatatcataagtcagatgatcggacataatctcccagccctttttacgataaaaaggaatgctgtaaggataaagataggaaatccattgtttattttgccgcatttgatctaagccgacttttactaaatcatgcattaaaccgtggccggcatattctggataggtgcccacaccggttaacccagccattttaaaaatttttccatgaatattaacttcacaaggataaattgcgagttgggaaattaattcatcgccattaaaccaaccaatcacatctgatttttctaagaccggccgtttagcacgttctagttcgccttcttcataaccactatcagaaacttcctgatcggttacctggaaaacatatcgtaataagtcattaaattgttctaaatactcgattgtcacgggtctaatttctaaattagctcgctggtcagccattgtttcgcctcatttttatttaatcgtttttcttattatacactacttagcacttgtcatgaatgtgtacggcgttaaatccgccatcccaatcatcgggtcaatctgatgaccactcaccaaggctggtgttaattcataattagcaggtgcttcttgaattgtttcttcgctgtcatctgcatcgtccactaatgccaattgttctggcgctgctgctttagccggggttagtttttcaacagttggtttagcttccgttaagccaacactagcggttttgaccgcttggctcactttttcgccattaaagacgctgataatccgttccttaagcgttgtttgccgatttgcggagagttccttggccgccttatcaaaagcacttggttccccaattaaaatcagtaaggaccgcgcccgtgtcactgctgtatacaacaagtttcgtttcagcatccgttgatattggttaaccaagggtagaattaccatttcaaattcagaaccttgagccttatgaatcgacgtacaatacgccaacgtaattttatgccattccgtccgtttataggtaatttcggtactatcaaaggcaatcgttaactcgtccatcttgtcatcactatctttagcatacgtaatcccagtaatttgcccaatttcaccgttaaagacgtttagttccggactgttaaccagatgtaaaatcttatcgccaatccgataatgaacgttgcctaaactgacttgtttcttacgatcatcgacctttggattcataatattttgaatcattggatttaattgatcaattccggctgcgccccgatacatcggtgctagcacctgaatgtcttttgtttcaaagccccggtcttttgctttagtgaccacttgcttaatcaccgattcaatctgataaggactgcactgaataaagctccgatccttttgcggttggagtagatcggctggtagttggccctgattaatctcatgagctagcggaataatcgtcgactcatcgtcttgtcgatagatttgttgcagttcgattgccggaattgcctgactctgcagtaaatcaaaaaagacttgccccgcgccaactgatggcaactgatctttatcaccaacaaagacgacttgcatattgctaggcactgctcgaatcaatgatctaaagaggtacgtatcaaccatcgacatttcatcgacaattaataagccgccttctagttccttactatcgatatcaggattattttcacgtcccgtaattcctaataagcgatgaatcgtgctagctggcaagccagttgtttcgctcatccgtttagcggcccgcccagtaggcgctgccaataaaattgggaatggtgtgtctttatattcgttgatatcaagcgaaagaccgtttaactcagcaaataaagtcacaatcccattaataatcgttgttttcccagtaccagggccccctgttagtagaaaggctctgtgagtcatcgctaatttaattgcatttttttggacatcatcatagctcatcttaaagcgtttttcgagccggcgaatttctttatccagatcatgtttaggataactaattttatcccgttcattttcaatccgcatcaagtggttggcaatttgccattccgcgttgtacaaaccattcggataaatccgattttcatcaccaacgactttgccatcgtgtgccaagaccattaattgctctgccactaaattcggatcaatcgccacgttccgggcctgttccatcaattgaatgctggctgctaataacggcttcgcctgggtaaacgtatcgccggcctgattggtcagttcgttcaaggcttgcatcagcgccccttgaatccgcgctggtgaatcggctgcaaacccaatcttctcagctaaattatccgctcgtttaaacccaataccggcaatgtcggccactagttgataaggattttcttgaataatcttcaaggtatcttcgtgataagtttggtagatgttataggccatcgagctcccaaaaccgtaattattgagaccaatgataatttgttccatgccattgttaatcgtcagcgtttcaaccaacgtcgcttgtttcttatcatttaaacccagcggcgctaaaacagttgagtccgctaagatcttatcaatcgcatctaatcctaaggtatcgacaattttctcagccgttttttgaccaatgccggcaaatttttcgccagataaataggcgactaagccagtcttagtcgtcggttggtcaacctgatagttgtcagcttgaaattgttgaccgtatttaggatgggtgatgactttgccataaaacgtatagcgttcgtcttctttaatctcaccaaaactaccagtcacgacaatctctggctcgtgccaatcgattgtcttatgggcaattttaatcaagagaatcttaaaaaagttaccgggattctcgtaaaaaacactttggaccgttccggtaacggttggtttattatcgaccgtattttctgtttccaaaatcgccatccctattatttctgatctttggcgcgtataaagccttcaatatcaatcagttgttgtttatttttttcaaagtatgctgaatctaatgttttggcacgttcaaaatatgactggctttctcgaccaagaactagctgcgttaccccatatttgaagactgcttcgccattttgagcatcaatgcgatgtgcatttttaaagtaggtttgtgcttgatcaaaatcgcctaaactaatcaaaatattaccgactaggatattagcatctaattgatctggttgtttttcctgaacagtgagtgcaaaggccattgcccgcgcattttgttccaattgatgataagtttgtgccaacatatattgcgcatctagtgcttgggtctccttcaccaattgcgagaaagtggtctcagcttgttgataagcttcagcttgataatagagtgtcccgagtgcatattggagcgcgtcgttttctgggaattgtgttagcgctttttgtaaaagcacttcagcttgttcataatctttgagggtcgtcaaaaaagtcgctagtgtgacgtacgcttcgatatcagtgggtgttttttctaaataatcgactagctgttgaacggcttcttcgtgttggccagctgcccatttttttaaaatttcgggtttcatcaaatcatctcctaaatggtatctgacgcagaaagtgtgcggcttaaaaaggacgtttcgttccaatccaatagttcaaatgactgaccttgatcagtcgtttttaacgttgtgacagatgaattcgttaaaccaccgtgggcacgaatatctgccaagggtgtttttaataacgcctgaatcatggcaactaatgccgctccgtgactcacaattaaaatctgatcgtctggtttagccgtggccataatctgcgcaatcgccgcagttgtacgtttgattacttgcgggaagctttcaccattaatgacgctcgcatcatattcagctggtgcttcgcggaaagtccgtaacgtttccgggaaccgttcctgaacttcagtaaaatacatgccttccattaaaccaaggtcaaattcgtggaggccatcgaccaccgtgatcggaaaatcttggtgtaaatcttgtttaagagttgctgacgtcacgcgcgtgcgcttcattggactcgtatagagatgggcaaactggatgtcttttaaatagtcggctaactcaccgatttccgtataactagaagccagtagtggtgaatcaccattcgcaccttgatagcgccctgccaaattccattcagttttaccgtgacgtacaaaatataaggttgtcatacactttctcctcaaaataacttacttttcattatgaaagagtcatcgcccaaattcaagtctatcctattaaaaggttgttttttataacaaaaaaggcaccgggaaaaatttttcccagcacctttaaaagcgtctcacgtattttttgattaatgactttcagcgacagctttcattgcaattgcgttgacgtagttcaatggttgatcgtagttaggttggaagaacatatcaaccattgctaattgatcaattgtcatcttcgtttggatggccattgaaatgacgttagctgcttgtgcaatgtcatattgacttgtaaatgagccccctaaaacttggcgtgtcttaggatcccatgttaagttcatcaaaacaggtgttgttgatggcatgaagtctgggcgataatcttcagtcaaagtagttgtcgcaactgccatcccgcgaaccttagcaccttcaactgtcaaaccactaccagaatatgtccgaccgaacaattcaacggctgatgttgcttgcgtacccatgtatttttcagttggtgtttcgatattgcggccaattaacaagccttggcgaacagcattagttgccaatggaatgtaatctgctttttgcgttgggttatagtatacagcagctgaatcgccggcagcgtagacccctttaacagatgtttgcatatattcatcagtcgtaatcgcaccgttgcctagcatttcaacttgatccttgaagaggccagtatttggtctgaaaccaacacataagattgcaagatcagctgtgtattcgttcttatcagtcttaacagttacttgatcagtacctgagaagctaactactttttcgcttaaggctaattgaacgccgtgatctctgtaatcttgttcaacaatctcagagatattaggatcaaagtttttacccagtgcatgtggtaaagcatcaatcaaggttacttttttatcagttgtcgcataagcttcagccaattcagcaccaatgtaaccagaaccgatgacaatgacgctcttcacatcaggggcactcttcttcaattcgttagcatgttcccagtttttacataatttaacgttggtattatcaataccttcgattggtggaatcactggtgatgaaccagttgtgacaataattttatcaaatttttcaattgtttcttcagaagtcactaagttcttaacgtgtaagactttttctttcaagtctgccttcaagacagtgtgttgcatcttcatatgtgcacccaattgggctaacatttctggacttgaatagaacatttttttaggatcagagacgtggccacctacccaaagcgcaatcccacaagatagaaatgataaattatcatgtgtttcataaacagtgacatcccaatcagggtgtgccgttaatgttgcttgtgttgcaaaggttcctgcgtgtgtacaaccaattactgctactttcatagtgttgcctcctaaataatataaaaacgatttcatcgtcagtttttgtgaaacatcacgcaatcagcgtgtaattatattgtacgctatttagttctaaattgtcaattttgacccgctatttatttgatttcacaaaccaaactggttatttatatgttatttaattgatacattgtgattttattctaaaaaaggacgttaatggttaaactcacccattaacgccctttctactattgaattaacgcatgaatcaaagtgaccttttgcgcttttggaccaattttaatattatcgtagagcaagtccttaatggcttcaatgtcttctcggttactataaatcgtcaatagactctcacctttttgaacggggtctccgatttttttgtgtaagactaatccgacagcataatcaatctcatcggttttcgcttgtcgaccaccaccaagtaacatgctggcaatccccatttcattagcggtcatttcagtcacataaccgttttctttagcaggtaattcgatttgatattgtgcttgtggcattaattttggattttcaataacggcaggatcaccaccttgataaataatcatttggcgaaaggcttcgagtgctcgaccatcgtcgatcacgccttgtagtaattgacgcgcttcatccaaggtacttgcctttccagccaagacaaccatttgactgcctaacgttaagattagttctgtaatatcggctggtccttctccttttaagatggcgattgattcttcgatttctagcgcattcccaatcgcattgcccaaaggttgattcatatcagaaataacggccatacattgcatccccacactacgcccaatgttaacgagggcttgtgccaattccttagcatcttcttcagtcttcataaaggctccggaaccagtcttaacgtccaatactaacgcatcggtgcctgaagcaatcttcttactcatgattgaccctgcaattaacggaatcgaatcaaccgtatcagtcacatctctgagtgcataaattttcttgtcagcgggggcaatattaccggttgccccaataatcgcaagtttaatctctgccacttgctttttaaaagcctcttctgttaatgaaatgttaaaatttggaatcgcttccaatttatccaatgtgccaccagtatggcctaaaccacgccctgaaatcatcggaattggaatccctaacgctgcaatcattggtgcaagtggaatactggtcttatcaccgacaccaccagttgaatgcttatcaactttgatgccatcaatcattgaaagatctaattggtcgcccgaacgcatcatcgtcatggtcaacaacgcccgttcgtcatcagtcatgtcattaaaataaatcgccattagtaacgcacttgcttggtagtctggaatcgtcccatctgtatacccatcaataaagaattggatttcttctgccgttagggcgccaccttgtcgcttatgatcaatgatatcaaccattctcatgctaatcactccttcttattagtcaggggcaatcaatgcttgggctgtatgcacatcaataattaaacaatttgcatagtgccccgctaatgcgcctttaatagccgcaattttttgttgcccgcctgctactaaaatactatgttccttcgtcttcaaatccgcgagttgaatcccaacggttcgctgatcaatcgctgcacacgtcacttgaccactcgtgttataaaaacgtgagcaaatatcgccaaccgctttttgttgcagcacagtttgttcttctttattaaaataacccgtttgaaagagtaaggcttcatctcgaaccgtgccaaccgtataaatcgcgatgttcgcttgcttgcccatttcaatcatccgtctaatatggcgatcttccatgacaacatcgtgcgtcgtttggttgccaaaaacaacgggtaacggcaagacatgcggcgctgtatggaaagccgccccaaatttcatcaggacttcttcggcataaaccggtgttggggtgtaagtgacactcccttttaattcaataatattaacgttttgagccgtttgttcttttagtgctagcgccacttggtttaacgtcttgccccaactgacaccgattaaatcattgtctttaacaatcgatgttagataatccgccgcatactgcccaagttggacaattgtttgttggtaatcggaggcatccgtataaacaacgtgtacctcaggtaaatcatatttttgttgaattaatgcttctaatgcctgcgcactggcataaggatcaacgatttcaatccggacaatcccaatttctttagcatattgcaaaagtcgtgagacggttggtctagaaatcgctagttttttagcgatttcttcctggctcatattggctttgtaatataaattagcaacagctaaactttgttgcgtttttttatgcgactcaatttctaccatgatttgaacctctattcatcaaattcattacatcaaaaaagtattacaaatcaattctaatagaaaaagcatcgctaagccaactaaagtccaatttaattgtcgtgttttgtggctcgcccacttcacaattggataaaagacgaaaccaaatgctaaccctgttgaaattgaacctgttaatgggatcaaaacaatcattaaaaaggctggaaaccattctgtaaaatcttgcaaatcaattgcttggacctgcatcatcatcaaagcaccggtaataataatgactggtgcaatggctgcttggggcacaaagcgcaacaacggaataaagaaaagtgcgcctaaaaataatgtgcccgccgtaaaggccgtgatgccagttcgaccaccactttcgatccccgaagcactttcagcagctgcgacggtgggactggtccctaagaaaccagagagtaaagtcgttaccgcacttgcttgaaatgcgcgtttaaattgttgctgatcggtcaataaaccttctaataagcccatcgattcaaaaactaagatcatggtcattgaaaaaaccgccagtccaaattttagcgtccataaagaactaaaatcaccttgcattaaaagttgcggatagtcacggatttgactaatcgtaatctgggttgttgcttgtgggacaagtttaaaaatccccgcgagcccactgattaagaaaatgccgacgataaaactccctggtgtttgtcttaaatacaatacgagcgtaacggtcaaccctaaaagggctaacagtggtgttgcttgactcaaatcacctaatgcgagcaacgactgtgtaccgcccgagcgaatcagttcggctttttcgagtcctaaaacaactaggaatagcccaataccaaccgtaatccccgcttttaacgatgctgggattaaagcggataaacgctcactaagagatgtaaaggcaatcccgacatagatcaaactactgaaaaaagaaatagccacggcttgttgccaagtcaaatgcatcccaaccactagggtatacgtgaaaaaggcattaacgcccattccaggtgtcaaaacaattggggccttagcccaaagtcccatgataaaacagccaattgctgatgaaaaaatcgtggcgaacacactaagattagccggaatccccgcatcctttaaaatcattggattaacaataatgatgtatgaaatcgcgaagaaacttgtgatgcctgctaaaatttctgttcgcacttgatttttacgtcccacctggaatgccatttttctaaaaactccctttcaaattaccaaacgaataagccaacagtcgctgctgataataatgacactaaaataccagaaagcaacatgtaaccaacgtttttagcaattaaattattctttgatttatcgactaagcccttgaaagcgccgataatcatgccgactgttgagaagttggcaaacgaggtcatgaagaccgttaggattgccttgtaatgtggggcaaaatcgccaatcgtatttgtcactttacccatcacaacaaattcatttgtcactaacttagtccccataaattgcgcgaattcaaaagcatgactaacatctaagcccatcaaccaagcaaatgggaacatgataatccctaaaagatgttccaatgtaatccaagggttaatcaattgtaagattttatcaatcaaagcggctaatgccacaaaggcaataacgttggccgtaataatcaagactaacttaccagcgttcaagattgaatcccctaaaaatgaaaagaagggttctttaccttgtacgtctacttgttcgtcagaagtatcagacccactaccactcatcgttgcaatcgtatcttcttccggtgttacttcaactggattcaagatattagtaacaataattgcgttaataatattaattggaatcgcggttaaaataaattgccccggcatcatttgtgtataagccccaataatggatgccgtcacacagctcattgacatcatggctaacgttaagttccgttcgcctttcatctgtttgagttgtaatgctgaaacagccaaagcttcagtgtttcccaaaaacatcatttcaactgcgaaaaatgattcgaactttggttgacccgttacttttgataagccacgccctaaccatttaatgatccatggtaaaacaccgatatacgtcaaaatatcgaataacgggataatcattagaattggtaacaagacactcgtcacaaaatccatttgcttaacagctacccaacttggtaaagcaaaggcaatcccggtataagcgacttgaaccaaccaattaaagccattggccgcccccataacgatgttacgcccaatcggaaagccggttaaaaaccacgctagaaaaagattgattgccatcataatgccaattgaacgccatttaatctgcgacttttttttcgagaataaaaaggccaagccgacaaagacaattaaaccgataatattcactaaaagatacatttcgtcccctacttccctgttttaagcaataccagcttctaatgcaaccgttatcatttcgttgaacgatttttcgcgttcttcagctgaggtttcttctcctgtaatgatgtgattactaatcgtcaacacggctaatgcctggacgttaaacttcgctgctaacatataaagtgccgcggcttccatttcagaacctaaaacaccatattggattaacttttgtcgatcaatttcatcgttgtaaaaacgatcctctgacaagatattaccaaccttaaccgcaattcgtgcttgttgggctgcttggtaagccttcattaagagtttaaaatcagccgtcggtgcataatacaatccggcaccaaatgtattttgaataatagcagaatctgtacttgcggattgggcgatcacaacgtctctgacgtgaacgtcagtccctaagccgccacaagtgccaacgcggatcaaccgtttaacaccataaaattgaattaattcattagcgtaaattgaaatggatggaatccccataccagaagcttgaactgaaatggcttggcctttgtagtaacccgtataaccaaatgcattccgaattgtattatagcggtgcacatctgttaaaaacgtttcagcaatatatttagcgcgcaatggatcaccaggcaataaaacagtttccgcaatatccccttgttgggcttcaatatgtgtactcatagaaataacgcctccattattttaattgtgttaaaaagcttgtaccaacttctcctgctggacaatcgaagttttctaaaatcgtcgcccctaaatcggcaaaagttgaacgaacaccaagtgattgattccctgctaaacgagatgaataagctaacaatgggacgtattcacgcgtatgatcagtccctctgaaaccaggatcgttgccatgatcagcagtgatgagtaacaagtcatcgggttttaaaacggctaataattcgcctaattgttgatcaaatgccattaaagcggccccgtacccttctggattacgacgatgaccatacatcgcatcaaaatcaactaagtttgtaaaactaaacccggtgaaatcggtttgtgcatttttgatggtttggaccatcccatcgtgattactttctgtatggacaccgcttgtaatccctttgccagaaaagatatcattaatcttacccactgcaaggacatccaagccagctgccttcaaacgatccatatcagtcgtcccggttggttctaatgtataatcatgccgatctgaggtccgttcaaaatggtctttgtcttgccccttaaacggacgtgcgatgacgcggccaattcggtatggcttttcaattgttatttgccgggcatattcgcaaattcgatataattcctcaagcggaatgaccgcttcattagcggcaatttgtaagacggaatcgcctgatgtataaacaattaaagcgcctgttgccagttgttcttcgccgtaatcccgaatcacatcagtgcctgaatagggccgattaacaattacggaacgaccactaaaagcagctagtttttgaattaattcgttgggaaagccattggggaaaaaaccaagtggttctttaactggtaaacccatcatttcccaatgaccatccatactatctttaccaactgaagtttcttgcatcttaccaaaataacccaaagctggttgcgccgcagggacacccttaattggatcagatgcgcgaatattacctaatcctaatttttgtaagttaggtaacttaaattgttcaccgtaaaacgcaccaatatgcccaagtgtgtcggcaccgacatcattaaagttagcagcatcactcgcttcaccaataccaactgaatctaagacaactgtaaaaacccgtttgaattgcatatttgttcgctccttttatttactgttcatgattttaacaccggcacttgcgcctaatcgatttgcaccagctgcaatcattgcttcagcatcttcttttgaatgaataccgccagatgccttaacccctaaccgatcgccaacgactgaacgcattaaagtaacatctgcaaccgttgcgccaccagtcgagaaaccagttgatgttttaacaaaatcagcacccgctttttcagataattcacaagcacgtcgtttttcctcatccgataatagacaagtttcaataataaccttcacgtgtttttgagcagcatggcctgctttgacaacggcttgaatatcacttagcacttgttcatcgtgacccgctttcaattcaccaacattgatgaccatgtctaattcatcagcgccattttcaatggcagcttgtgcttcaaaaactttagtagctgtcgttgttgcacccaaaggaaagccaataacagtcacaactttaacatcgctatcttgaagtgcctcactagcacgcttcacccaatatggatttaaacaaacagatgcaaattgatatgtttttgcttctgcgataatttggtctacttgagccattgttgcctcaggttttaataatgtatgatcgatatattttgctaagttcataattagcgcctccttgttttgttaacgctttcagtttaacgccgttttgaacatttgtaaacacctatcttgaaattatgtaaaattcacaattaaaaagaagcgataccagaattatctttggcatcgcttctttttaatgtgtcatagtgctattaattagacgtattgtaaaacttgcttgtcagcatcatcggtagcgactttgtaagccacgtcgattgtgccgccacctaaacattctgcgccgtcgtagaaaacaacagcttgtccgggtgtaatagcgcgcactggcgcatcgaagacaactgtagcagttgtctctgaagtcatgtgaactgttacgccaacatcttgttgacgataacggaacttcgctgtgcaatggaaatctgtgccgtgatcaactggtgtgatccaagtcatcttacttgcatccaattggtcagcatagagtaactcgttatggtagccttggccaacatacagaatattctgctctaagtctttgccgacaacaaaccatgggtcgtttgattcgccaccgccaccgatcccaagaccagaacgttgaccgattgtgtagtacatcaaaccatcatgtgtgcctttttcaagaccatcgacagtcatcatcttacctggttgtgctggtaagtattcgcctaagaattgcttaaagttccgttcgccgatgaaacaaatcccagttgagtccttcttcttagcagttgctaagccagcttcttcagctaaacgacgcacttctgatttttgcatgtgaccgattgggaacattgatttttgtaattgatcttgagaaagagcactcaagaagtatgtttgatctttattgctatcaccgccacgcaacatgtgggcaatgccgttttcatcgcgttcgatctgagcatagtggcccattgcgataaagtcagcatcaagttccattgcgtaatctaagaaagccttgaatttcacttctttgttacacataacatcaggattaggtgttctaccgtgcttatattcgtctaagaaatattcgaatacgcggtcccagtattccttttcgaagttaacggaataataaggaatgccaattttagaagcaaccttggcaacatcctcataatcttccgttgcggtacagacaccatttttatccgtatcatcccaatttttcatgaaaacaccaataacgtcataaccttgttgctttaacaataaggctgttactgatgagtccactccgccgctcataccaacgacgactcgtgtattactgtggtcaaccacaatatcaccatcatttcaaatagattctagttttctacgatttgaaggtcgtgaattccagtactaccattatagcaatcctcgctcatatttcaaaccaaaacactcacttttcataagcaattgtcaaaaaaaaggaaccctaaccaattttgaccattggtggcgttcccattcccatttgattatgcttgggctaccaaaatatcccgttcaatcaagtgattaataatgaaattaaattgttcaacgttttcagcgttcttttcatccttaaaaatattaactggatgtaacccatcagcggaagtgaccgacattttgagcgtcttcaattctttaccaacagtaattttaagcttaatcgctgtattaaagggtgaattaggatcaagaggccgttccaattgaaaattaccattattggttggcatgaagccagtatctcgtaatgtatatttcttaacggcgtcacttaacccatattgtgtcgtattgcctaaaaccgttgctgtctcttttaataaagccatcttgctacctccatcaactgattgatagtttcattttagcatagatgaagcggttgcgcctaggctttaccggcttgcttagccaagtttttttgcacaattttagttaatgcggcacaaaaggcagtcacatctgcttcagttgtctcaacaccaaaactaattcgaatactttcggcaactcgtgggctatcttcaccgtacatggcaattagaacgtgtgaaggttccaaatcacctgcagtacatgctgacccacctgaaatcgcaaagcctgctaaatcaaggttcatctgcaagacataggttgagacacccttaacccacatatttaatacgtggcccaccatatcgtcactacctgcgccattgacttcaaagtcaataccgtttgcttgaaggatttctaagacttgttgtttgaaaccagcataccgagcgcgatgttcagccttaacagctggtgtcaacaattcaatcgctttggcaaacccagcaacggctggaatattttctgtccccgcacggcgtttcttttcttgttcgccacccattaaaaatgatggcaaatgaatcgcttcattcacgtacaagaacccaatttgcttaggcccattaatcttgtgtgctgaaacagataacatatcaatctgatcttcttgcacatcgatatccaataacccataagcctgagtggcatccgtatggaaccaagcatttgattcgtgaacaagttgaccgatttcgtgaattggcatatgactaccaatttcattattgcccatcataatcgttactaaaatcgtttccggtgttaaggcagcctttaagtcagccaattcaataacgccttgtgcgttaacgggtaaataaacgacatcaaacccttggctttctaaataagccattggttttaaaacagaatgatgttcaatcgctgtcgtaataatccgtttaccttcgttagcccgtttttgagctgtttgtaaaataaccatgttattactttcagttgcaccactggttaaaataatatcgttatccttcgcattaatactttgcgctagaatatgccgacttgtatctaaaacagtatgtgcttgacgcccaaagaaatgggtgctagacgcattcccaaaatcttgggtcatctgcgtggtcatcgtctcgattacctccggtgcaatcggggtcgttgctgcgttgtctaaataaatatgttccaaaatttttcgcctcgttttaaaaagtatctatgttattttaacatagaagccactttattagcggtagaaacacttcaaaactaaaaaaagactagggttagcccctaatcttttaatattgcttcaattatgcggtcatcaaggctgctttttgttgttctgatagtgattcattcatccgaccactcttgaaaccagctaaatcaacagtgacaaattcgaacccagcttgttgtaaggcttggttgatttgttcgctgtgtgttaaaaagtcagcaatttgtgcttctggcacttcaacacgggcaattgattcgtggtagcgaacacggaccgttgcaaaacctaaatcacgcaagaatttttctgattgcatgacttgcgcaatcttttcttctgttaaggctgtgttatatgggaagcgtgaagaaactgaacagctggccactttgttccagttattcaagtttaattctttcgctaattgacggacatcaatcttatagaaaccagctgtttgaaggacactttctgcaccagcttcatcacgagctcgtaagccgggacggaaatcactattgtcatccataatcatgccatctaagacgtgatcaaaccctttttcagcagcgatttggtttaattgtgtgtagaacatcttcttgctgtaataccaagtttctggtgtgttattagcaatatgttcatctgataagtagtttaaagtggttgcttcaacgttagctcccatttcatgtgctaagtcgattgccttgttaaattcttcgtctgtgaataattctgagttagcaacgactgctaagacattttccttaccgagtgtttctaaagccatttttaatactaatgtgctatcaatcccaccagaaaaggctacgattacttttttcatttgttgtaaattggcagccaacattgcttttttttcagataatgtattcattgttaaagacttctttctatataattaaattaattgttttaattctgataaaccgttttgaatccgatcagcatacgctaaatcattgttatctaaacttttgacaatcattaaattcaaatctgtggcactatcaacaaagtgtttgaatgttgattgacccgcactttgttgtgcgtcgtctaaatccccgtatagttgttccgctgttaagagggcttgttgtgcttcaataagactcgttgaaattgtccctggttgtgacgcatgtgcagcgacttcaaataagttgaccatcatcgtttgagtttgtttaatttgttcccgcataattgattcctccgattaaattagataccaaagaagctccgcatgaagagtgcggcacataagccaccaacaaatggggcaatcccaggtacaataatcccgtattgccaatctgagttagctttatttttaataggtaaaatagcgtgcgcaattctaggacccatatcacgtgcaaggttcatcgcgaatccggtaggaccgcccatccccatcccaattgcccaaacaagtaacccaacagcaattggtgcaatccctggtgtcttgatttgtgtaatcgcgataattgatgaaatgaaaacaaatgttgcgaaaaattcaacgaagaagttccgaggtaaattgcggataccaggggctgttgagaagatgttccgaacagcgactggatcgacattgccttctgaagctttgaattcgtcggcgtacataatgtagacaatgatagcaccgacaaccccacccaagacttcagcaactgaataaggaatgaacattgcccatgagatattgcctaaaacgcattgtgctagtaccatcgccgggttaattgagacatccccgaagatgaataaggctactgtaatcccgaagccccaagttgtgatcgcaaataaatgacctgagccacgatattttgagcctttgaggacttcatcactatgaaccccgaccccgaaaatgatcatgagcgctgtgcccatgaattctgctaataactgatgaaccatgaataaattcctccaaataatgactattttaaacgtgcttttgccagtagcttgctgtgctttgctacatcagtcaaatcactcactttgtcggcaattcgtctgattaggcaaatgctcgcaagctaaccactggcaacgcacttttattttaattgctgataaacagcgagataaacttgattaagcgccacgtcataggccttagcggctgctaagcagtcgtcaaactccggcgtatatttttcaatatcgtcgtaattaactactttgacccgaatatcaccataactcgttgtgacggtcataaaatgacgtggcatgatggtgcgtcccattgtctggtaacgcacgccaacggttgatgtgtgtttcaagatcagataagtaatggcttgctgatcggctggatgaatcatgaccgttagtttgatagctggccgatttttcttcatctgaataggactgaaaaaggcatcgagcgccccattatccatcaataaatccaaaaccggcgctaaactttccgctgactgatcatcaatgttggcctccaacactaatatctggtctgccttttcttcaacaacttgttggcttagttttttttttcgcacaacatcacacgtaacgcattgagttgtggtgtttcccgattaccaaagccataaccaactttagtaatcgtttgattgtctggaattggacagaattggtcgacaatcgtcttgacaatgcccattcctgttggtgtaatcaattccgtatgaatctctgggttttgcttaatcggaatcgcaatgcccactcgcatttgcatcacagctggtaccggaacaggcatcattccatgggccactttgataaagccactgccatccgttaattcggatgaataaacttgatcgactgccaataattcgagtgcgacaaacgcgccgacaatatcaacaattgaatcaagcgcaccaacttcatgaaaatggacgtcacttaatggtaattcgtgaacgatcgcttctgatttggcaatttccgtaaaaacttgtttagcattggttttaacataatcacttaaatcactgtgatcaatgatggcttcaatgtcctttaaatgccgaacttcatcgccatggctatgtgtgtgcccatctgcatgttggtgtggatgatcatgatgatgagttgatgtggtttcaataaagccttcatccttgtgcacggtttctggcaaatgaacatcaaaatcggtcccatagatactgcttttagcgatccgctgggcatgcaagtggtaaccagtcacatttaacttggccaattcggtctcaaattgcttgaaatcaacccctaaatcgagtaatgcgccaataaacatgtcaccactaatccctgaaaaagcgtctaaataaagtgttctcatttgtcatcctccgtctcacttaaatgattgatcatacttgctgagtaaccggcgccaaaaccattatcgacattgacgaccgtaatgcctgaagcacaactattgagcatcgtcatcagcgctgttagtccaccaaagttcgtcccataaccgatgctagtggggacggcaatcagtggtttttcaatcaacccaccaacaacactgactaaggcgccttccatgccagcaaccacaatcacgacctgggcctcacgaatctcatctaaatgttcaaaaagacgatgaatgccagcaaccccgacatcataaattcgtttcacttggttaccgtaaacctctgcggtaacggctgcttcttcggcaaccgccatgtcagaagtaccagccgtcacaacggcaatataatgcttagtttgttctaccggctttaacattaaagtgacgcactgggctaattcatcataatgggcggttggttcggcaactctaattaccgcatacttttggggagatactctcgtacagagaatattttcagcatgccgttttaaagaaccgataatgccgataatttggtcggccgtcttaccggcaccatagattacttccggatagccattacgtttttggcgacttaaatcgaccttggcaaagcctaaatcatcgatggtttgttcatgcgctagctgcttggtagcctcttttacactgacttttttgtttgcaacggcttctaatagctgttgtagctcatttgttgtgtccaaactactcattctttctattgttatttcacaataacccctaaaccatcagggattacagtcacttttgcgtccgcaccttcaattgcataggctcgttctaaggcagcatctaaactagttgccagttccatatgcatatcggtaattaattgaggatcaactaagtctgatacgaaaatcacgtgatgttgcactaaaattcgggctaaaatttgtgacgtccattgatcgggcaccgtttcaagccgtggtgtgttaattgcttggtctaagaattcctttggatctttaacgtcggcaatattatgatagaaaccatcgccaccatgaccatcacgtgcaccagcgaccataataattacgccaccttgtttattcgtggcttcagcagcagtcatccctttgaccgcttggtagatattttgatcaagtggataaccaccgttggttgaaattgcgatgtcacaatcaattttgtcgacttctgatagactttcaacgaagtcacagccttttttgtgcgccgtttctaaattaccggcaaaagaaccgatgatatgtttatcttcatccaaaacaacattcaagataaatttaagaccggctgttttagcggcgtaaaccatatccttgtggactggattatgcattaagttcccagttcttgaataatgggaattgataaattcacctgagtggttggccataattgttttgtatgacgccacacccggtagaattgatttccgaccgcctgaaaaaccggcaaagaaatgagattcaatgaaaccttctgaaattaacaagtcagcttcaacagcaattttattgataatacaatcgccacctgaaggtaattggccaattttaaccactgaactatcatcagttgagatgtgcatgacgatttcttcattagcaacgatttcttcaccatacttattgacgagttcttcgtgcgttgaaggccggtgaaatccggtggccaccaaaatgcgaatgcgtgcatcaggtgccactgaacgaatccgtcttaataaaataggcgtcataatatgtgaaggtactggtcgggtgtggtcagaactgatgatgacaatgttcttctttcccttcgccaattcttccaacttcggactatcaataggattatccaatgactgttcaactgtttcggcctcactcaatggattttgataagtggctgcttgagaaaccaacttgccggcaaaattagcatctgcaatattagccgtaataattttttgatcgtaaggtaattttatagctaccaaactgtaggacttcctttctcggttctaaattaacgcttaaaaaagctacgctcatagttatacagattttctgaaaaggatgcggtataatttatagacaacattaaacgttacaaaaggaaggctacaaatgttaacaaatgttcaattaaaatagcgtacacttaagacttaagttatcgaataataagtataaatgattattaatctcaattaaggtaggctatcgcattatggttttaaatgatattgaatttctaattaattttttagaggatcgacaagtcccaattatcaccaaaaaacgacatacttatctgacctatcatggtctagaggaacgttatacctatatattgaaaaacggcattatcaaaaattcgattatcttacaagatggccgtgaatttaacttatcttatatcgcacaacccgacgttatttcgctccttcgcgatgaggtctctaaatacaccgaccaaccctttaacgtccggattgaatcagaagaagcaaccttctatcaaatcgatcgggtcaccttctggcactacgttaacaccacccctgaattgcaaaactacattaaaaattactatcgtaaaaaattatctgaaaatatttatcgtctgcaaaaaatgatgatgaatggtaaaaaaggcgggctttgtgccttcttatacaacctaatcgacctatttggaatcaaacaaaaagacggtattctgattgattttgtagtcactaacgaagatatcgctggtttttgtggcattagttccagaagtagtgttaatagaatgctcaatcagcttaaaaaagatggtgtcttgcaaactaacggccacaaatttttaattaaggatgtcagttatctattggacaacattgccaactagccgtttgttaccatttgtatacatgaaatggcattgaaaacccctatgagacgcgtaacatgaacagcatcaattgactcatatggaggtttcatcacatgcatattccagataattatttaagtccacaaacctgtacttttttcttcgctgccactataccaatcgttggcttggcactaaagaaggttaagctacaagttgccgaaaaaaaagaaacggtgccgatgctaggcatctccgcttctctgtcgtttttaatgatgatgtttaacgtgccgattcctggtgggacaaccgcccatgccgttggtgctactttactcgccatcctgattggcccgtatgccgccagtttatcggttacacttgctttagtgacacaagccttcttgtttggcgatggtgggatcctcgcgctaggtgctaatgtcttcaatatggctgttgttatgccttttgtcggttatggtatttatcgactttttcaaaaatggcatcacgaaaagttgggtgttatccttggtgcttatctaggcatcaacgcggcggctttaatggcgggcattgaacttggcttacaacccttaatcgcccatgacgcagctggtcaaccactttatgccccttatccgctacacattgcgattccagcaatgttattcgcccacctattaatcgctggttgggttgaagctggtttcacggttgcggtctatcaattcatcaaaaaagttgcccctaacgaactttacgctgcccctcaaaaactcaccgcagtaacaccaactaaaaaactacaccgtgccctttatacttttatcgttggtttgattattttgtcaccgattggtttattagcaagtggcactgcttggggtgaatgggacgcaagtgaactcttgcaacaattaaaaacagcccatcttagccaagtcctcccgaccggtatggcccatggcttaaactttaatgccctctttagcgattacgcgattcaagggcttcccctaccacttggttacatgctatccgcactgacagcggtccttatcttctatctcattggaaaactggtgattaatcattatgcaacccacgcctaaactgcctgattggctcaacaaaacagaaataattccccaaacggtcgctaaacccgaccgttttttaattcaaaatttacggttactgacggctattttgtcacgactcgcccaaccaaccatccgacatcaatcaactcggcaaacacctggtattcaattgcttagtttactcattaccattttaatcgtcgtactcacacatagctttttactcatttggctaatcggattattaacacttatccgtatttgtgtcttaccaggtcagcaaattggaccacttttaaagcgagtcgctagcattagtttagtcgcccttgcgttaattttaccgaatttctggctcggtcacgctgaaacgacttggtattttattattcgtaccgagattattttattcaatattggcttttttttacagttaatcacctggcctgcgtttattttagccttacgccaacttaaactacccggactgctagttttaactttagaaattagtcttaaatacagccatttattagcacaatttttacaagaatcactttgggcaatacgcttgcgttcaaccggtaaagcgcaaaaaagacagcacttagtcggttccttgattggtcgactctatctaagcgcacgagcttatatgactgaattatatcaagcgatgcttttacggggttatactggtcatgttaatcaacaagcatcattaaccattacacgctacgattggcgcttaatcagttgggatctcaccttgatttgtctattctgtttcattcggaggtaaataatatgctacaactcaatcacattcactatgcctacacccaaacagatagtttaacggatatttcgctcactattcagcctggtgaagcagtcgcgtttatggggcccaacggttctggtaaatcaaccttattcaaattaatcaatggcttaaacgaaccaacggccggccaatattactttaaggaccagttagttgatcatcaatttttaaaaaatgcggctcaaacgaccgccttacatcgtgcggtcggctttgtttttcaaaacagtgatgtgcaactcttcaacgaaacggttttcgccgaactcgcctttggtcctgaacagatgggtctgtctaaagaagccgttcaaacccgtgtgcaagactgcttaaaactccttcaaatcgaaaaactcgccgatcgagtcccctatcaactatccggtggtgaaaagaaattagtcgcattagggagcatcttaacaatgaatcccgaaatgattattttggatgaaccctttaatggcttatcggcagcttatcagacactattagttcaactactacaacagctgaaccaggctggcaaaagcattttgcttgccagtcataactacgaacaggtgcaacaaatcgctaagcgaattgttatttttaacgaaggccatcaaattaccaatgatttaccgctaacggaaattcaacggcaaccagccctaatggcagctttaagacagttataataatttaaaaatataaatctaaaaacgtatcttctgatgaaggtgcgtttttttattaaaaaaggctggcacaaaaataaatttgtgtcagcctcaaaagtcattattcatttcgattcataaattttttaaaacttctaaaatctaaaaaagcaaccaaacaggataaaataatcgccatcggaataaagacgaagaattcgttgctaacgagcgtcgctattaaagctaaaaatagccctaaaaggattaaataccgataatagcctagtttaagataaacataatctcgataacgctccggtaaaaatatcatcaatgttattatgaataacacgccatacaaatccatctaactaccgccttttttatctatcattttcaatctgtacccatttctccgtcgcatccaccgtaattgtctgaccaattggtaatgtcagaatcggttgcgtatgcccaacattgacattatagagtactggtatcgtttttaaaattggaaatttcgctaaaatatataagagcatttcttcatccaaatcaacatccgtcgggattcgcccgataatcagcgcctgtggctgtcgaatactttgtaagagtgccgctagattacgtgaaaaatcgtaacgatcagaatcatctgaacactcgatcaataaaattttacgatcataatttggttgataagacgttccttgtaaggtgtagagcgtgttcaagttgccccccactaactcacccgttacgcggcctttggcatatgtctgccattgattgtcgtgatagtcgcgcttagcatccggcaagtaccatgcatcacttgaccattgggcagatgcagtcaaccgaaccgtatccgtgccctgagtcatcactttttgccaattttgaacttgataatcaccgagttgatccgctaatttaaatgcgatgtaagacgggccgtaataggtcactaagccggtcttagcggtaatcgcattggccaacgatgtaaaatcagagtagccacaaataatcttagggtgtttagcaatcaattcaaaatcgagatatggcaataattcgttggcattataaccaccagtcaccgctaaaattgctttaacgttatcatctaaaaaagcggcatgtaaatcagcaacacgcgcctcaattggacttgaattaagacagtccattaccgtcatattttgaccaaatgttacctgataaccgaggtcgtttaggcgtttgagcgccgcttgattggcggtaaacccgcccacactttgtaaactattgctaggtgcgatgacccgaatttcatcgccttttgataatcgtttgggaatcattttcctcacactcctctaagacttaaccaccataaattgttcacataaacaaggaatcgttggctcaaatgttcggtttaactcggcatattcagccgtaaaaaaaggttcatgaaccgctcgccaataatcaagtgttcgatcaccctcgccttctaaataggcatgatcagctgataccttattataagcaataattttacagctcattgttttagtaatcgcagcgggtttcccttgtccatctaatataatattataagcaccagcctgaggtacatgctcattaggttaatacaagtcaatggtcgaagtagttgccgttttttgaccactaatgactagtaccgctaattcattagccatttgcactgtatttccaaatgaataaatctctgctggttgccgttcaggtgataaattttgttctttaataaacgtttgccaatattgctcaacctctgatgtcattggtaaccctccgcatccagttattagattggcgtttgtttaccagaaattaccattttgtcaaaaaaaataagcctagcatcaaagctagactcacttggtcacttattgccaccgtcccatttttttgagcatcatcggatagcttttaattaagaaccatttttttaattgaccggttgtttgatcagcacgaagacccacgatacctttagctaacatctgttcaaaagtaattgtcggttctgtccattgaccatcaatgtaacaaagttggcaatactgcgttgccttggtgccatcttgttcacgaccttggttggctggtgaaagtggcatgccacaactttgacaaaatttttccatagaaactcctgattaatgtgcttttcaacccatattcattcgccttgttaggctagtgctcggaatatcccgggtttgaacgcacttcttttttaacgtgctttttgaaactcccccttgcgcttaacaacatttgtcaaatcagcgattacatcgctaatccgccaaattaagttaatgctcagagtcaccccgtttcaaacgcacttctttctttaacgtgcttctcaagctaactttctgcgcttagccctgtgaatcaaataagcgaccttgtcgcttattcgcttccctgtgctaatactcaaaagctaaccggcttgaaaagcacccattcttatttaatattcttcaagaagttgaggagcattgctgctgatttttggcctgcttctacgatgaattcgtcaaacgttacaccagcatcctcatcaccaacgtcactcatagcacggataacaacgaatggaatcccaaattgggttgccacttggccaatcgctgcgccttccatttcacaagagagggcttctggatagatttccttaatcgctttgattttatcttggctggcgataaattggtcacccgtgacgattaaaccaacacgtggttgtaagtcaactgctttggcagccgcttcaatttgtttgactgtgttagcatccccttcaaaacgttggggttgttgtggtaattgtcctggtaaataaccaaaggccgttgcttcagcatcatggtatgcgacttgacttgaaatcacaacgtcaccgatgtgtaagccttcgccaatcccaccagctgaacctgtattgataacaacatctggtttttcttcggctaataaaatcgccgttgtcatcccagcttgtactttaccaatccctgattcaaccaacgttacttcatgaccgtacaattgtcctttatagaaggtattgcctgccaccgtatgttcttgaacatcttctaacttcgttaacaatgtccgaatttcttcttccatggcacaaacgacactaattttcatattaatattctccgtttcctaaaaataatcgactttactagtttatatgaaaaataagatcaagtaaacgattataattaatccaaatgtaatcccaatcgcccagttcaaacgagtcttcaatcgtttaactgctgggagatcttcttttttctcacgccgacgcttcttttccggagcgtcatcggtcacagccttgaaagccgccttttgcttttgtcgggcatattcccgttcggttcttaaccgttcttgatcgcgttgtttaaaagccgcttcttccgcctctttttgttggcggtaagcttcacgcgtactcggttcattagccattgtcagccctcctatttgctttgtaattgccagtagtatagtgccataatcgttttggcatcacaaatgagcccactcttaacggctgcttgcgcttgtgcgagtgttaagcgttcaacgttcaaaaactcatcatcatctaacggacgtttattagcaactggggttagagccgtcgtataaaagagcgtcattttttcattagaaaaacctggtgatgtaaaaaattcagcaatttgttgtaaattagccgtcgttaagcctgtttcttcatttaattctcgtaaagcaactttggccaaatccgtttcacctagatcaatttttcccgctggaatttcaagcgtttcacgttgcattggtgcgcgccattgtcgtaccaataatagctcaccatcagctgtgattggaataatcccaaccgcaccatggtgatagacaatttcgcgactggcggtttgaccatctggcaaggcaacttgttgaaccgctagatcaatcacatgccctttaaaaagtgtttcttcggataataccttttcctcataagacatttaaaattaaccacctttaattaagtttgcattcttgtcaatcattatacgcgcttttgaaatcgtccgctatcagtacgtaaaagttcattatttggttgggattaaatatccatccttaggctgatacctttttaatgaaattactgttaaaatgaactcatcaatataaatttaggagctgacaataatgtttaaaaaaataaaaatatggtgtattggctttctaattatggcagtttcaattccaacgttcgcaactctttttgatttctatggcgattgggataacttcttgtgggtcggtctaggtgtcttactcgctgcgatctacatgctaatcagttttaaacgccttaagcaacaaccccaatacaaaaccaatcacaaaatttcagataaaatgctgaaacactatcaagatgccggcatgagtgatgatgagattgatttcttcagatcaacaatgcaccaagccgaaattgaagttcaagctttggcaactaacatgcaagctcttcctaaattaaaggcgattgatttaaatcatgaaacaacgcgtgtcagtcaagccatgttccaagcaatcgtcaaggaacccaaacgcttgcacttagctagcgattttctctatcgtcacttaccttcaattaatgaactaacgcgcaaattcatcgagattagtcatcatgaagttaagacggctgatacctacgctgttttggataaatctgccgaagcaatcgatgctttgagccaacaaattaagcaagattacgcgacttttgtggccgatgatttagacgatctcgacactgaaatctcagttgcaaaacaacaaacaacccctgatcacaaggaggaaaactaatgacagacgttaccgaaaaacaagatgatttaatgagtgatttattaaaagacccatttgatcaagcagcccctgccgttactgaagaaacggttgaaaaaaaatcaggtgaagaattactaaaccaactctcacctgaacaacaacaacaagcccaacaattggctgaacaattagacgttaacgatcaacaggcggttctcaactacggcgcccaggcccaaaagaaactaggtgctttttcgcaaacaatgttgaatcaagtccaaagccaagaaactggtgaaatcggcgacgcactgacctcattgatgtatcgtctaaacgaagctaacccagacgaattacgggccgaagacagcaacgttttcaagcggatgtttggtaagattaaaaaatcagtttacgaagtcactgctaagtatcaaaagattggtgctcaaatcgacggaattgcgatcaaactggaaaaagaaaaagacggtttaatgcgcgataacgaaacattggaaggtctatacgctaaaaacaaagcctactttgatgcacttaatatctacatcgccgctggtcaactcaagatgcaagcactcgatcaaactgaaatcccagctgccatggcgaaagccgaaaatgacaacaatcaaatggctgtgcaagaggtcaacgatctcaatcaatttaagaaccggcttgaaaagcggacttatgatttagaattagcccgtcaaattacgcttcaacaagcaccacaaattcgcttaatccaaaatacgaaccaagcgctcgctgaaaagattcaagcctcaattaacaccgctattccactctggaagaaccaagtcgcaatcgctttgaccctcctccgtcaaaaagatgcggtcactgcgcaacgccaagtttccgaaacaaccaacgatctcttgaagaaaaatagtgcgatgttgaagatgtcatcaattgaaaccgctaaggaaaacgaacgtggtgttgttgatatcgaaacccttcaaaagacccaaaacgacttagtcgaaacccttcaagaaaccttgaagattcaacaagaaggtcacgaaaaacggcaaatggctgaaaaagaattaaaccacatggaaaatgacttacgtgatcatttattagcctacacacaaggccaaacaacgaataacccgggtcctaagaatgtaaactaaaaaagattcaaaaaaataatcggtcctgacatctttgtcggaccgattatttttttagtttttaacaaccattctacgatgtttcagcatccgccatcctgttaaggctgtcgcaatcaaacaaataaccaaggcgaccatgaaggcatcatacatcccagcgatgaagacgtccgcgtgacctggaatataccccgttactttttgaccgtaattacgactcattgcggcatacaagaccgttgtcgatagcgaaatcccaaagaccatccctaagttacgcgctaaggcgttaatcccaccggcaacccccaaatcttggaccccaactgaactcatgacgatcgtgttattgggcgcttggaaaatcccattgcccagtccgactaaaccgacgaagaacatgaataaccaaattggcgtttgtaaattcatcaacatataaccgacttggctaattgagattaaaatcaagccgacaaaagttaataattctggaccaattttatctgaaatactaccagcaatcggtgccacaaccacttgcacaattgggaaaatcattaagctataacctgctaaattaggcgctaagcccaatgcattttccaaatagaatggtgaaatgacgttaaagaagaaattaacgataaaaattaaaaatgcacatagtaaacttaaactaaaatcaatattcttgaataatctaaatgataataagggctattcaacatgttgttcgatccaaacaaaaatcccagcactgatcaaggctaccacaaaagccgttaaaatgattggtgatataaagccaatttgttgaccgataaaaatgccaaggaacaagctgacaatcaaggccgcaaaactgacaaatccggcagaatcaattttttcatgtgttttaataatatctttgggtaaaataaaatgcccaaaaataatcgttaaaataccaattggcacgttaatccagaaaatatagccccaactaaagtgtgtgaggattaaaccaccaatcccgggacccgcgatactgcctaaagccacaaatgaaccggttaagcctaatgctcggccccgttcttttaatgggaaaacttcggtgataatcccattattattgctcattgtcattgaagctcctagcgcttgaacgacccgcgcaccaagtagcaatggtaggccaccgttaaacccacatagtaatgagcccaatacgaaaagaagagtcccaatcttgaaaactttaactttcccgaaggcatcgccaactttaccaaataatagcagtagtgcacaaatcataatcagataaatcgagacgatccattctgattgattcatcggaattttcaaatcccgactcatgacaggtaacgcaatattgacgatactcccatcgagggtggccatgaaggtaaaaagccccaccgccgttaatatccgccaacgattcttttgaacctgcggattatctgcataacttaacgccatctgtaagtcactttctttcttttcaatttatttaataataagtatacccttctttcagaaaattaaatataaaaaatcacccctgaacgctcgaaaagagggttgggggtgatttttaacgtgcttctcgagtagccttttccggttaactaccaaaagagtattatggtaaaaaataccataatattctttttacgttaatcctcaaagcctaaccaactcgagtcagcactcactttatttaacgtgcttttcaagctaactttctgcgcttagcgctgtgaatcaaatcatcgactatgtcgctaattcgcttccttgtgttaatgctcaaaagttgaccaagcctgaacgcacttattttactcttgccaagaagtattttttcttgcctcgacggacaatgacaaatttaccttcgaagttttcgcttgggtcaatttcaagtgttgtttcgcggagacggtcaccgttaattgtgatggccccattttgcacatcttcacgtgcttgccgttttgatgattcaattccagcatccactaagaaatcaacgatgtttttcttttcagctgtgatttcaactgttggtgctttttggaaagcttgttctgcttctttgacatctaaggctttgatatcacctgagaaaagcacttccgtaatcttttgggcaccttctaattcagcttggccgtgaacaaaacgtgtcacttcttcagctaaacgacgttgtgcttcacgtttttcaggggctgtttcaactgttttagcgagttcgttaatttcagcttcatctaagaaagtgaagtatttcaagtatttaacaacatcgcggtcatcttggtttaaccagaattggtagaattcgtatggtgttgtcttttcaggatctaaccagatggcaccgccagctgtcttaccaaacttcgtcccgtcagccttgagcatcaatggaattgttaagccgtagacttctgtttcgctaccttcaattttatgaatcatatcgatccctgaagtaatattaccccattgatcagcaccaccgatttgtagttgcacatcgtgtgctttgtaaaggtgcatgaaatcgactgattgtaagatttggtatgtgaattcagtaaatgaaatcccaacgtctaaacgactagcaaccacgtctttagccaacattgtgttgatgttgaataacttaccgtaatcacgtaagaaatctaacaatgaaatttttgataaccagtcgtagttgttaaccattgaaacgttggcatcttcgccgaataaacgtttcatttggcctgataaagcttcaacgttatgttgaaccatttccattgtttggagttgacgttctgatttacgaccacttggatcaccgattgaacctgttccgccaccgataacgatgtatgggtgatggccagccaactggaagcgtttcatcatcatgaagggaattaaatgcccgatatgcatactatcgccagtaggatcaaccccacagtataatgagatactcttcttttcagttaattcacgtaaaccgtcagcatctgtttgttggttaattgcgtcgcgccatgttaattcatcaataatattcttttgcatttgaaaccctcctaatataataaaaaaagtccccataatcctcatgagaagattatagggacgacttaaaatttaagttcgcggtaccacccgaattatgccagttgcctagcatcactcattgattggtacgtcaatcacacgtctgaccacttagcgcattgtaattcgattctaagcatatactggttcccagcaatcccagctctctggtatagcggcttattctctactcattacgcggtcattgatatttaactatggttatacgttaatcgatttaacaccgcttgtcaatctaattatcatcaatctattaaaaagaaggtccacagactaatcagtccggcaccttcttcaaagtattattaatcttttttaagattatagttttttaacgttagcagcttgtgcgccacgtgtaccttcaacgatgtcgaattctacggcttggccttcttctaatgatttgaagccttcgtcttggatagcactgaaatgtacgaagatatcgtcttggccttcaactgagataaagccaaaacctttttcattgttaaaccattttactgttcctttttccatgatgttactcctttaaaatacactatattatctagccaaccgtattggtcttctaaacaagttcattatacgtgattttgtaaccgcacgcaatcagaaactctgattaatttaacttgtaacatgtttgccgatggtactgttcattggcctttaaaataacattgccaaagtccgcatgatgaatcgcatccggcatcatttgggcttcaattgcgaccgcttcgtgcggttgaatcgctttatcagtcaagtttggttcgctcccgaaaccgttggcagtgtagatgacaattgcattaccttccgtattaatcgttagcgagcgaccactagttggttcgattaaaaccgcatcatttcgatcagcatttttatttaataagaatggatgatcgtagccatttaccaatttattttgtgtttcttgactagcaaaagcatcagcgattgcacgtggttgccgtaaatcgaaaacagtttgatcaactggcaataattgcccggttggtagaccatctggttgaatttcgccgaaacgatcactgtcgatttgcaattgatgaccgtcaactaattgatcgaagtcccctgttaagtttaaataaacgtgacaagttgggttgaaaagcgttgtttgatcagatgttgcttggtaatcaaccaaccattcattcttttcattcaaggtataagtcgtcgcaactgacaggtttcctgggaagccattggcaccgtcaggacttgttaatttaaaagtaacgctaattgcgtcggcttgttcttcaacgcttgcttgccaaacttgagattcaaagctattaggaccaccatgattggtgttttcgccgttattaagtggtaattgataatcgtggccgtctaatgtgaaggcccccttaccaattcgaccggctacccgaccaacagtcgcgccaaagtaagcttcttgtttgagataatccgctaaattatcgtaaccgatcaccacatttttaaattgtcccgccttatcgggcatcactaaattcgtgatggttgccccataatcgataactgctaattgatagccctgactattttctaaccaatgttgccaaacagtctgaccattaatcgtcccaaattcctgacgccaatatttcatgacttgacctccaattgatttttaacaggttgtcagcaacactttttaggcattgttgacacgctctgtaaatttgataaatgctgcttgtccttttgcatcgcgcttgaagacacctgcatcttctaaaacacgcatgaagactttaccgacttcattttgaaccaatgccgtaacattggctggtgtgactgctgaatgatcagccttgatttggtcggcccatgttttgtgataagcggccatttcatttggttgatcacagaggtatttttcaacttctgccatttcagacttcaaacgtggtggtagaatcgctaagcccatgacttcgattaaaccaatattttcttttttaatatgttggacatctgcgtgtggatgataaataccatctggatgttctggcgatgtttgattgtcacgtaagaccaaatcaatttcatattgatccccacgcattctcgcaatcggtgtaatagtgtgatgcggtgtcccgtctgcttcttgcgctaagacttggacttctggatcactgtagtgttgccacttagtcagaatgtcagcagcaagtgtttcaatgcgtttagcatcactgcctgtcaaacgaatcaccgacattggccaatcaacaattccggcttgaatatcatcataacccgcaaattgaagtggtgtgctgattggcgctttggccattggaaaatcatgccggccaccttgataatgttcatgcgttaaaattgagccccctacgataggcaaatcagcgttactcccggcaaagtagccagggaactgtttaacaatttgtagtaggtttttaaacgtggtttgatcaatcaccattggttcgtgtttgccatccaagaagattgaatgttcattgaaataagcatatggcgaatattggaagccccatgtttgttgttctaaatcaaagcgcacaattcgatggttacgccgcgctgggaaatccaaccgacccgcatacccttcattttctaaacaaagttggcatttaggataacccgtttgcttcattgttttagctaacgcaatttgcttaggatctttttcaggttttgaaaggttaatcgtaatttctaaatcgccatatttagtgggtacatcataagcgatattcttcgcgattgcggcaaccttgatataatcgttggcttggcttaattcgtagaaataagccaacgccttttctgggtccttttcgtataacgtccaaaaacgcttgttaacggcacttggcaatggtgtcaccaaatccatcaacttagcgcccaaaatatcgcgttcagccgctaaatcttgaatccgctgatggtcaactgccaattggaccaacgcttctttcaagtcaatcaaagttgtcgtctcttgtgcaacaactggtgtttcatcaccttcgccaactaagtcgaggacaacgttaaataaatattgttcatcttcagccgtataagttgtttctggaaaagtgctgacttttgtaataaacttttgaatcaattctcttgcttgcatattctttcctctaccgatctgcataaccattaggatggtttaagtgccaattccatgcggtttcaataattgcttccatattgtcatatttagggacccagccaagcgtttcacgcgctttgtcacttgcggcaatcaatgtgcttggatcaccggcacgacgaggagccattgtcacaggaattgccttgccagtcactttacgagcagcttcgacaatttccatatttgaaaagccagttgatgagcccaagttaaaggcgttgctatcatggccgtctttgagatattcaaaggccaagatgtgcgcatccgctaaatctaatacgtgtacgtaatcgcggacgtttgtcccatctggcgtatcgtagtcgtcaccaaagattgataattgatcacgtttaccagcagcgacttgcaatacgattggtaacaagtgcgtttctggatgatgatcttcaccaattgacccatctggtttggcaccaacaacgttgaaatagcgtaaggcgacaaatttgatgccgtaagctttatcggcccacttcatcattgtttccatcatcaacttactctcaccgtaaggattggttggtacttgtgggtcggattccttaattggaattgccttaggttccccataagtcgccgccgttgatgaaaagacgatccgtttaacgccgaattcgttcaccacttcaagtaacgccgtcatcccataagtattgttgtcaaaatattttaatggcgattgcattgattctggcacgattgaaaaggcagcaaagtgaatgacaccactaacgtcttcttgttggaaaacgttgcgcataaattctttatcgcgtacgtcacccttataaaaacgggctttggcgttaatcgctgccttatgtcccgtaactaaattatcgacaactgcgacgtcataaccgcgttcaattaattgatcaactgtatgggaaccgatatacccggcaccgcctaatactagaattgacatattgaaacccctcctaatttaatgattaacctaacttcttagcaccgtctgcgatttctgcgacatagaagcttggggcataaccaattttatctgtataagccttagcaacattttcttcaaaattatcaacttggtcttttgcaacaatcgcaatggcacaaccgccaaagccagcaccagtcatccgagcgcctaagacgccaggttgttgccaagctgattgaactaatgtatctaattcaatccctgttacttcataatcaaattgtaatgacacgtgtgatgcgttcactaacttaccgaagcgttcaaggtcattgttcttgagggcttctctagccttcattgtccgttggttttcagatacagcatggcgagcacgttttaataggttttcgtcttgtaacatgtatgtttgtagatcaaatgtttcgttatctaaatcacctaatgagttgatatcattcttagtttgtaaaatcgctaatgctttttcacattcactacgacgttcgttatatttagaatcagctaattcacgacgtttgttagtgttcatgatgatgatcacgttgtcttgtaagtcgattgggaccaaatcataatccaaggtgttggtatcaagtaaaatagcgtggttagccttgctcatcccaactgcgaattgatccatgatacctgagttaacaccgataaatttattttcaaccatcatccctgttttaacaaggtccacacggtcgatatctaagttgaattggtcttctaaaataacacccattaataattcgattgaagctgacgatgataaaccagcaccattgggaatattaccttttaaataaatatccaaaccatgatcgattgtataaccttgttcttgtaagtaaacaatcatgcctttaggatagttggcccagttgtgtgctttttgatatgataaatcgctaaggtcaaatgaaatgacaccggcatcttcgaagttgcctgataaaagattgattgtttggtcttcacgtttagcaacgactgcgtatgtccctaatgtgattgctgttgggaaaacgtgtccgccgttataatctgtatgttcaccaattaagttgatccgaccaggggcaaagtaacttgcttcaggttccttgttgtaggctgctttaaatgcggtattcaattctgtcatgttcatagtaaattcctcctttattaatcgctttcattttactaaacatttactaaaaaatcaaactatttttttaacgcgcgcattattttcgggtagtatgctaaactagatagtagtaaacactgaattgagaggtgcaccttggcaactattaaagatatcgcacaattagctaaagtttcaaacgcaactgtctcccgggttttaaattacgatcagtccctttctgtgagtgatgaaacccgccaacgcatttttgaagctgctgaaagccttagctacactaaaaatactaaaaaaaataataaccatcggggccgcatcgccattgtcgaatggtataccgctacagaagaattggaagacctctactacctatcaattcgcctgggcgttgaaaagaagctgcaagaactcggttttgaagtcactcgtttttttcaaaacgatcctttcgataccctttttgatgccgcgggtgtcattgtcatcggtaaatacagcttgggtcagattacccgtttaaagaaattaaaccgcaatctcgtctttattgatatgaataccttagactacgagattagttgtgtcacgaccgatttcaaaacaccggtcaaagcagttgtcgatcattttatggcgagtggtttaacgaaaatcgggatgttaacaggccaagaaagcacgtccgacaatgttaaattgggcaccgacccccgctcaacccacttcaaacattatcttaaaaagcaaaacaacttccatcccgaatggctacttaccggcgatttcacaccggaatctggttaccagctcattacacagttacttcatgaacaggccgataacttaccagaagcactcttcatcgctaacgacgccatggcggttggcgcactgcgcgcccttcacgaagcagccatcaaagtgcctgagcaactcagtttgattagctttaatgacacgtcaatctgccaatacacgttcccaacactcagctcggtcaaggtctacaccgaacgaatgggccaatcagcagctgaattattaattaagcaactcgacgcggaacaagtcattccacaagtcattacgattgggacgtcactaacattgcgtaatagttcaaaataatgagtatggggctgggacaaaagtaaattttgtcccagcccttttttaccatatcttattcccattccacggtataatagtaaaatcagataatgttaggagtcactattttgaaaacgaaaaaaatgcgtcggctattattaaccgtcgccatccttgcgattggttatttgggtggtcgcaataatatcctgcaagatatcacccagaaaatccccgccattacacaatccaccatacaacaggcgcaagtcagtcccgattatcaggcaattgctaaccgcgactttgaaaatggcagcgccgcttatcttgccatcaacaacgacaaaagccagttgactagtgcagattggaccagcgaaaaaatcgattacggccaattagatcaactcaatcgaaccacttcggcaacagcctatctgtcttcccgcaacctagggaaatctgaagggcgctcacgccaagtttggaatccgactggttggcataatcaaccactggtcgtcaacggtcgccgcatcacacctcaaaaccgtggccacctgattgcttacaccattagttttaattttgatcaaaatggtcactttcaatcggggcagccaggtagtttagataatccgttaaacctggcgactcaaaccgaatatagtaatcaaaagacaatgcagattttcgaagaaaaggtccgtaacgcactggccgctaataaaaaagtaatctataaagtgacaaccgtctttcgtggtaatgaattaatgccccgcggttactgggtccaagccatctcgacagatggcacccttaatttcaacgattatgtctggaacatcgaacccggcgtcgcctttgactacgcaaccggtcgttctcacttagatgccaacattcaagtaaaagataatcatccgattgtaaaagggacagaaaataccgtcaataatatcaaaaatcgattctaaaaaagaagcagccacggttaggttttctaacggggactgcttctttttataaattgaaataatactaatttatatacgagttatgtttatattcaaatattaaccgcatactttttttgaatccgttatttctccattgccttgcgcaatgctgctgctagtggactttcagctggctcttcttcttggtttactttttgaattaggcggcgttcttcatgttttgaaattttcttcttacaatcttttttatcgagcattttttctgtcgttccatcattcaagcaacggaaataagcaccggcttgtccttcaatgatgaccattttcttatgacattgtgggcaccgatggttggaaactttgggatctttacgacgccgataatgacagtttgtgcagacgtaaaccttgccgtcacgcgtattacgctccttcaacggatggtcacattctggacatttcttgttggtaatcgcgaaatcgtgatattcagtttcactctttttaatctcagaaaccaaggtcttagtggccgcttcgatttcagtgatgaacgctttttgattttcttgaccacgcgcaatcgcctctaatgaattctcccatttaccggtcaattctggtgagaccaatgttttattaaccaatttcaacagttgttgccccttaggtgtcactgctaaggaatggccacggcgttctaagagttcactacgcaccaatttttcgataatttcggcccgcgttgctggtgtgcccaagccatagtgttccatcttacctaataaggtcccttcagttaagggtttcggcgctgatgttaattgttccttaattgaaaagtcagcaggcaccactgcgccttcttgccaatcaacacttgtagttggtgtttcttttgaatccgcgtgccaaccttgttgaacgactttagtttgtttgaaggtaaaggtgtgatcaccaaactgaacagtcgcttttgtaacggctgtgacatattgatccgcaaacaagcccataaagcgttcgacaattaaacggtacatccgcaattcatcggtagataatttttcagctctgactggttcttcggttggaattaaggcgtagtgatcagtgacctttcgatcgttgaaaacagccggttgtttcactttagcgccctgccctaagtattgtttggcgcgcggatcaaacttcactaaggccgataaacgttccttcaatgtgccttcaatatctgttgaaagatatttagaatccgtccgcggataactaacaactttatgaatttcatataatgattgaatcaatgacaacgtctttttagccgacaagccgtacatcgcattggcaacttgttgtaattccgtcaaatcataaggcagtggtgcagcttgtgatttttggctcgtcttgacactacccactttaccttgtgcctgcttcaatttagcgactagcgtttcggcttgcgcacggtcttttaagccctgtggtttagccatttggagcgtggcttgttcttggccaactttcaattgaattgtgtaatatttttcaggtttaaaacgactgatttgttgcgctgtttcgttcacaaaagccaatgttggtgtttgaacccgccctgctgacaaattatcttcatatttcgtcgttaaggcccgcgtgacgttcaagccaatcaaccaatccgcatggccccgcgcaagcgctgaagcgtacaaattatcaaactgcttagctggtttcagattggcaaaaccgtctttaatcgccttggtcgtttgtgatgaaatccaaagtcgttcgactggcttatcaaatttaatccattccaaaatataacgggcaacagcttccccttcacggccagaatcagtcgcaatgactgcccctgaaatatcctgacgatgcgccaaatggctgatagcctttaattgcccacccgttttaggaagtggtttaagcccgatatgcttaggaatgattggtaaatcttctaaacgccattgttgccactcttttttaatatcttccggtaattgtaatgataaaagatgaccaaacgcccatgtaattacgtattgatcgccttcaaaataggttttagttttctgattagtaccgagaaccttggcaagctctttagcaacgctcggtttttcagtaatgactagttttttacgcatttaaattcctcttaatgaattgctcagattagttactgactattagtataacgcatatgggaaggggaatgaactataagctaatgagaacagattaaagttttactttgtattgacatatcaaaaaagagcaagcccctcatcttttccagatgtttggcttgctctttttagttttattcatcgtcttcagtctggttactgagttgttgtttcacatcataggtattacaaatagccgttttaatcacttgtgacatttgataatctgcctgaccaagatttaaataaagctctaaaatcattggtaagttcaaactggctaaaattgtgatgcgctcatctgttaaatagcgttctagtacgacattacatggcatcccgcctggtaaatcaacaacgattatcacttcttgtgcatctggtcttgtgcatctggtttaagcgcaacttcaatttgatcacctaataacgtcttactaatttcacaatcgaaggtgatggccgttacattatcatgcccgccggcaatcatatctaaactcgttaaataacttttggccaaatcaccatgactgactaatatcaattgtctcattcgctaatcatccttttatctgtaagttctaacggccttggtccgttctgtttgatccgtagttgttttttgattagctgtatcggctaatacggtccccgtgtttagtgtacttaaaaccatactcgataataaaattgtctgataggctttcataatttactcctccattgttatcacaatactcaagatttttttattatagcattcaaaaatgcttaacagaggccgttacacgggtaaaagagtcagtctaataacagtcaatcaaacgactataaatcaatttttcgttcaatcatattgcaacgtaactatcataaaaagcccgaccaattggtcgagctttccatgatggttgttgcgtttccctttattttggtacactcttagtttaccaaatcatgatttcatcaccactgacaaacacgccgtcttgttctaatcccgaacaaaacgcttcatttgtacagttgttatttcatcagccgttcgatttgacgtaaattaaaacagacgcgcacatcaacggcctcgccagattcttttaaattaccttcaaaccaacgatcaatttggttaatgagtgccccactgtaaaagatctcaaagtctttcaactccgaatcagtatagtgtggtcgatatttttcaagtacttgtttaaagacagccgttgtgaaggattcaaagaaagcacaacgcagcatttcatccgagaaacgatagagatttaaacaaaattcaggataacgcataatgaattggaccatctcgtgacagccctcttcccagtggccggcgcaaatcgcctgcctcaccagtgctagtacctcttgctctaatgtccatctaaacagaccacacatcccatttggaaaatgataataaaaggtcgttcgtgagacctctgcctgttctaaaaactcagcgacggttaattttcgttgccgtttctttgataataattgcattaaaattaatgccatatgttgcttcataacttgtcctttcctcatttacccaccccttcttaatttttcctcttctagtttatcaaaaaaatgataagtcatgtttaaacattaacaaagactaagattaatgtaatcgttatcaaatttttcgaacaaaaaaagctcagattgccgcaataacgcggtatatctgagcttttttaagcatcatgtttatttttctaaaccttcagcaactgcttctgggtagttggctgtgacaatcgcagcacaacgcgcacaaagcattgggaacttgtcgtctgaaccgacatcggtcttaatcatccgacaacgatcacaaacgtcaccttcgtcatgagcaacactaacagcaacgccgtcaaattgtgtggcttctgctggggcttctacagcttggtcagcaattgttaattgtgagacaatcaataattgtttaacgtcagcatctaatgaagctaataaagcagcattggcttcgtttggataaagtgttacggcagcttctaatgacttaccgatgaccttgtccatccgggccgtttcaagggcttttaagacatcgtcacgaatacccatgaaagcattccatgtagcgactaagtcttcttcaccggcaaaatgtgccacttctggcatttcagctaattgaacgaattcttctggttcatgtaagtagctccagatttcttcagctgtatgtggcaagattggtgttaataacttcgtcaaggcaactgctactgcatagaaaacagtttgcatgttacgacgaggcgcatcattttggccatcaatataaacaacatctttagcgaagtctaagtagaaggctgataattcgtttgttaagaacatattgattgtcttataaactgtggcaaaatcgtaagcatcgtaagcagctttacaactttcaatgattgcgtttaagcgaaccaacatgaacttatcaactgagcctaattctgcgtaatcaactgtgtctttggcaggatcaaagtcggttgtgttagcgatcataaagcgcattgtgttccggatcttccggtaagcttcactgacttgttggaagttttccattgtcactttcacatctgaactagcatcgactgaggctacccagaggcggacaatatctgcacccatttgtttgatgatcttttcaggtaggattgtattcccaagtgatttactcatcttacgaccattaccgtctaagacgaagccttgtgagataacagccttataagggctcacttcgccaaccgcaacactcgtgattaaacttgagttaaaccaaccacgatattgatctgaaccttctaagattaagtctgctggataagttaattcatcacgagcagctaaaacagcttgatgtgatgaacctgaatcaaaccaaacatccatgatatctttttcttttgtaaattcaccatttgggctaccaggatgtgtaaagccagctggtaataagtctttagcatcccattcaaaccaaacgtttgaaccgtgttctgcaaagagttgtgccacacgttcgattgtttctggtgtgatgatttctgtaccgtcttcagcgtagaagattggtaatggcacaccccatgcccgttgacgagagataacccaatcgccacgatcacgaatcatgttgtaaagacgcgtcttaccccattctggcatgaattcaactttttcgatttgtgccaagatttgatctctgaacgcatcgattgaagcaaaccattgtgctgttgctcggaagataactggtttctttgtccgccagtcatgtgggtaactatgcgtgaagaagtcgagtttcaataatgagccgttcttttcaagcgcttctgtcaccattgggtttgctttgtcgtaataaacaccttcaaagccaggggcatcttcagtcataatccctttgctgtcaacgactgaaagcactggtaacttatattttgtcccagcgttgtaatcatcttcaccgtgacctggtgccgtatgcactaaaccagtcccagtttctaatgtcacgtggttccctaagatcaccaatgattcacggtcatataatgggtggcgggctgtcattaattccatgtcagcacccttgaaagtcttcaagatttcaactgattcccaaccaagaagatcagtcatcttgttcaaacgttctgcagcaacaacgtatttttgaccgtcagctaatacttgaacataatcaaaagctgggttaacagcaatccctaagttagcaggaattgtccatggtgttgttgtccagatgatgaattttgtgtcagcatctaataaatctttaccatcaacaacgttaaacgcaacgtacattgatggtgacttgatgtctttgtattcaatttcagcttcagctaatgttgattctgatgaaggtgaccagtaaacgggcttcttacctttatagatatagccttttttagccatttcaccgaagacacgaatttcttcagcttcgaaatcagctgttaaagtgatgtatggattatcccaatcagcagaaataccaaggcgtttgaaatcttggcgttgcgtgttgacttgttccatggcatagtcgtaacaaagtttacggtagtcaacaaggctcatttccttccgtttaataccctttttagccaaggcttgttcgattggcaaaccatgtgtatcccaaccagggacaaaaggtgcgcggaaaccgttcattgatttgtaacgaacgatgatatctttacttgttttatttaaggcgtgacccatgtggatattaccgttagcaaatggaggcccatcatgaagtacgaatgatggtttaccttcatttaatttttgccgttgttgataaaggttgttatcggcccaacctttttgccaatcgatttcacgattaggcaaacctgctcgcattgggaaagctgtcttacccaagtttaatgtttctttgatacgcattaaatcactcctcaattttttaaaacaaaaaaagaccccgccccgtataggacgaaatcttcgtggtaccacctaattttgagagtcaaagaccctccttaagatgcgttaacgggcattggccgttccaaactacttgattcatctgaaaaacaacaaggtgatacacactaaatagagcattaccaaccttccaccagtcgttggctcgcttaaatgttatttaatttgttaattcttgttattgtctgttaatggttcgctatcgtcttcttcgattggattatagccatagtcattatgagtttcttctgattgaatttcatcatctaaagtatcggccttaatgactggttcttcaggtgcttcttcatcagctacttctggtaacttatcatcagggaaaacaatcgtatgggttgtttgatcagaaaagtcatcagtcgtaatatcatcccatggtttaactactgtctctgagtctactagattatgcttcttgctgtcaaggtctgtgaggtcaatttctgcagataatgcttcatgaccagctaaatcatctttagataataggtctgtccattcggggctcttaacaacttccaattgtgattcgagcatcacttgtaatctttgacggaaaacgcgtgtttgtttcttcaaatcgtctgtttcgatggcgatttgtttagcacgttcagttgcatcttcaataatgtggttggctttttcagtcgcatcattcaacattgatttagaattcttttctgtttcagtttgaataatttcagcttctcttttagcattttctttaactttatcggctgcttcttgggccacaataattgattggttcaaggcatcttttaattcgttaaagtaagtgaccttttcatcacttgattttagttctgcttttaaagcatcattttcatttaaaactgattcgtaatccttaatcacttggtctaaaaagtcattaacttgatcaggattatatccccgcatcttattgccgaactctttgttatgaatatctaaaggtgttaaaaccattctgaaatccctccgtcattttcaacatttctattattttcttagaataccaagtgtcacacggtatttttctttacgcgtttgaccatcaattgatttgagctgaatacgcccatagccacggacagaaataatgtctaataagtctaattcaaaatcaggcttatcaaaggcttgccaattcaatttcactttattaccttgaacaagctctttagcacgttgccgtgacatattataaactgccgcgataatcgtatctagtcggaatgaactgactaatagctgttcaaactgccaagcatccctggggataatcaactcagtataggcttgttcttcaaggtgaacagtaactttaccaatcttcgtaatctgattcaccacatagtcagccatcttagttgtgacaaaaaattgccaccgttgaccatccgtcatgatatcaccaaacacgtttcgatcaataccagcgttgaccaatgttcctaaaatcttaccatgcgaaagctgtgcaaatttaattggataacgaatttcaaagagttggatttcaaaatcggcttcctcaggttcaaaataagttggtgcaatcaacgcacgttgtcgttcagcagcattgtagcccccactgaaatggtatttaagctcacccttttcaccaattaaggtttgtagaatgtaagcctgtctaggatctaaaaaatccgttaatattgcacggtattcagttgttgcttgttcaatccaatcaagaacttgtgcaacaaatggcgcttcactttttctaaagtgctgataaacagcttcgttatcagccatcttagtaatacctcatggctaagatttgaataatcgtccctaagccacgttcgactaaatacaagacaaagccagcaatgatggcggaaaaaccaataccaccaattgctggtatgatccggtcaaaaacccctaagaagggttcaaccaatctcgcaagtagctgacctaatttagaatccatcgcacctggaatccaagttaatagacaataaataaagatgatgcccacataaatccttgtggcttgcattaggaacattaataaatagattacaaattgcacttagttcacctcagaatcaaaatcattttgatcgataatatcggatagattaccgtcaatttcatagtttggtggcgtgcataaaaagatttgttcaccgacccgttgaatttcaccattaattgcgaaaactgtcccggtcagaaaatcaattatgcgtgacgcttgtgcaccctcaattctcgtaaaattaacaataacggctttattttcgagtaaatgcttaccaacttttttagcgtcagagtaaatacgtggttcgcaaagtacgattttattcatcttagcattgcctgcggcggtcattgaaataatattatccggacgtgatgttggactgacttcatcagttgtcttggttccttgcagatcagtcgaataatcttcatcttctgtcatgccgaaaaaattactgaaactaaatttaccagccatcagtcatcctcctaattatttacgacgtcgtttaaaaaatgggggtacatcattgttatcttgttttgtatccacagcgtcactgtctacttgtgctgttcgtttgaagatgtcgaagtctttcttttcaacttcatcaaatttttcagtagctttcgcttgttcgcgtggattaggttcacgacgcatgtcccaattgccgaaaggatcgtcattagttgtttgtttaggtgtactaggttgtacaggttgacttgttgtttgagcagcttctggacgttttggtgttttaccatcgttatcgatcccagttgcaatcacagttacgacaacttcgtctccaagattttcattgattgatgtcccgaagattaagttgacttcacttgttgcagcttgttgaacgataccagcagcatcttgtgcttcaaataatgacaagtctgggccaccagtgatgtttaagaggacttgttctgcgccatcgattgaaacttccaataatggtgatgaaatagccttcttcgttgcttctgctgtccggttttcgccagtagctgaaccaatccccatcaaggcagaaccttggtttgccattactgttttaacatcagcaaaatccaagttgacataaccaggtgatgtgattaagtctgaaatcccttgaaccccttgacgtaaaacattatcagcttcgtggaaagcttccaacattggtgtcttcttatcaacaatttcaagtaaacggttattagcaataatgactaatgtatcaacatgttgttttaattcagcaatccctgaagcagcgtttttaccacgtttagggccttcgaatgtaaatggacgtgtcacaacaccaacagtcaatgcgcctaagtctttagcgactttagcaacaactggggctgcaccggtaccagtaccgccacccataccaccagtaacgaagattaaatcagcgccttttaaggcttctgctaaaacttcttcactttcttcggcagctttttgaccaatatcaggtgttgaacctgcacctaaaccgcgtgtcaatttaggtcctaattggatttttgtttctgcttttgaatcttcaagcgcttgtacgtcagtattagccgcgataaaatgaacgcctttaacgccttcatcgatcattcggttaacggcattgccaccagcaccgccgacaccaattactttaataactgcgccattgttttcttgttccgcatctaatgaatattccatatgcttttcctcctgtaacgactagccctattcaaaaaagttactaaagaaactttttaggccttcgaatgtatgctttgattcagttttatgtttcttttgtggtgcttctttaggtgtcgcttgagtcttagcagttgacttcgtcgctgtttgacgtgcttcaaattgctcgacattgccaagcgcactttgaaccagccaatccacttccgtcaagttagctatgtagttaattaaacttaacccttgcgcaaacgaaggatgacgtaatcccatttgatctggaatgtagagtttaacagggcaattaaaaacttcctgtgctaaatcaacaattccaggtaaagctgtcacaccgccggtcatgacaattccgcccggcatatcgaacgcattgactttatccaaggccgtcttgagacgatcaaagatttgcatcatacgtgcttcgataatttcagctagtttcttctcagtgatttgaatcggcgctgtttgacccacgacttcgattggaatttgttcttcctctgaagcaactagtgaatccgcattcccataatcacgtttagctttttctgcattctcaattgatgtatttaagaccactgaaatatctttggtgatgtggtcgccaccttcttggtcaattgcagtaaattttaattgatgatcatgaataactgcagcggtactttgaccaccaccaagatcaacaataattgcgccaaagtcttgttccccatctgataacgctaatttacctaatgctaatggattaacgaccagttgtgagagttcaagacctgctttttcaatacatttctttaagttgtgaatcattgttttaggtgccgtgaataaaattcctgacatttcaagacgcacacccatcatcccgcgaggatctttaattccgtcaaaaccatctacagtaaactgcattggtaagaccgttaaaatctcacgttctggtggtaagttccgcactaaagcggcgcttgcaacatcttgtacatcttgacttgttatttcttttgattgatcagaaacggcgatcatgccttggcattcttcaatctgtaatagattagctggaatacctgcgacaacttgtgtaatttcaatatttgctttttgctctgcttgttgaacggcttgttgaatagcggaaactgcttgatcaatatcaacaattgtgccgcgactcaacccattagatcttgccgacccaacacctatcacgtttaattgtttattcattgattctgcaacaataactttaattgaagtagttccaacatcaagcccaacatatatttttgaattctccattaaatatgtggaacctccttgcattcaattagaataaaatgattcctatgctaaatagtaccacatttcgactaggtttagaaagccttagaatgttatttgaagcccgttaactaattatttaagcgattacgacttcgattgcttaaataattttgaatacgcacccacttcaaggtcaattttacccttgccatccatttgtttcactaaaacaggataatatttaatttttttggccaacgttcttaaatcaccaattacttcgttaccatcattcatatataagtgaacttgataaggattatcattttgtgccgttaaacgaatctcagaaaccgcactttgaatgctatcaggaatatcattataaagcttaaggcccagtttcaaataacgatcatttttaaaatggctgtaaaccggactattccctaatgactgggtcattttcgtttttaaaatagtcccattttctaagattgggtaatactgcttatgcttaaacatataccccaccgtcttatactctgaaacgttgattgcaacatgatttatttggctcacttgcaagccaacctgtttaatcttaggtaatttcgtttgaatattatacttagttttcgtgtggtgcattaattgccacaacacattatcgccaagctgaatcccacttgcattaatgacctgttgatcgggtaccgactttgtgccgttaacggctaactgttgaatatcactttttgttgagatgaaataagttgcagtcaaactacctaaagtaaaaatccctagaatgaccactagttgccatctgatctttttaccacgttgtttctttaactgcggtagttgattggtaattgttgggcgccccggttttaaacgttgtcgccgttgccgtttccaccgtttaatctggtaggcgcgccacacctttaataactgtagcggatcatgtgacccgagctgctttttattatttttcaagtcacacgcttctttctacaattaaataatcgtttcaatgacctcaataatccggtctgatgcatccggaataccactcttcttagcagctttagccatcgcatgttgtttttctggcgtttcgaatagtgtatctagtgctttaacaagactagcacctgttaattctggttctggaattaaaatagcggcgtcttctttcactaaactttgcgcatttttagtttgatgatcatttgtcacgtatggactaggaattaaaattgatggaatccccaatgccgtaatttcagcaagactagtggcaccagcccggccgacaattgccttcaagtcaggtaatacttcgggcatattactaatataaggcacaaacgccaaattactatttaacgtagtattagctaaggctgcttgcacattttcgtaatggacttgaccagaaacgaataggacttgatagtcacgttcgtttaaaagtggcaccgcatcaataaacgccttgttgatacttggggcgccacgactacccccaaaaatcatgacagttggactatccgtttttaaaccaaattcgcttaagcgttcattgggaaccattccggccacttgttgggcccgtggattccctgttaaaatgactttgtgcattggaaattgatcgctaacagattcaaaagaaattgccactttatcaacgaaccgtgctaagaatttattcgtcacaccggctgctgaattttgttcatgaataatcgttgggacttttaaacgacttgcggcatataacagtgaccctgacacataaccaccagtcccaatgacaacatctggtttgaattctttaatcatttttttagcagacttaatactgcttataaacaattcgattgttttaagattggttttaatcccgttaagattcattgagcgtttaaacccttgaatctcaagtgttttaaaatcaatcccctgatcaggcacaattttactttctaaaccacgttctgttccgacatataatacggcatctaacaaaccacgttgttttagacgttcaattaaggctagtgctgggtaaatgtggccacctgtgccaccgccagatatcattactctcattattaaatctccaatttattctgtaatttgttcaaccgcatcaatgtagacatcgccgcgttcttcaaacgttttgaattgatcccaacttgcacaagcaggtgataataagatcacatcaccctcttgacttgccgcgtaagctgcagggactgcttcagttagttgatcgacaatttcaatcgtttcaattccggcttctttggccgtttgtgccaacaattgctttgtttcaccataaaggataatcgccttgacatgggctttcaataaatcagttaatggttcaaacgtaaagccacgatcaaggcccccagcaatgagaacgattggttgtttgaaactcttcaaggcaacctctgtcgcttccatatttgtggcttttgaatcgttatagaaacgacggcctgcgaattctttaacgaattgcatccggtgtttaacacctgtaaaggtcgttaggacttcaataattgcttcgtttgattggcccattaacttagcggctgccagtgctgctaaggcattttcaacattgtgatcgccagggacattaatatctgtaactggcatgatgacttcacctttaaagcatagttggccatctttgacataggccccttcttcagaagtgcctaatctagaaaatggcacaacttgcgctttggtttgttggcttaaggttcttaattctggtaagtcccagttcacaacaaagtaatcagaagctgtttgattttggacaatccgcatcttagcttgcacgtaattttcacgtgtcccgtgataatcgagatgtgcttcgtagatattcgttaagactgctaccttgggtttaacagttgttgtccccatcaattgaaaacttgataattcggtgaccattgtatctttggccgttgctttttgagcgacttcactcaacggaataccaatgtttccggcggcatatgcatgtccttgtgcacgttgatagttcaacattaaggcgattaaagtcgtcgtagttgttttcccgtttgagccagtcacactcacccagtcagcttcagaaacttcataagccaattctggttctgtcaagacgggaatctcgcgtttgatggcttctgccaccattggattatcatagcgaattcctgggtttttaaagaggtaatggaacccttcttcaaataaagcaactggatgactacccgtaatgacagttgcaccaagcgcccgtaattcagcgactgctggtgtgtcctcttgatcttggccatcattaacagtaacttttgcgcctaattgtaataatagtttagtagcgttaacgccacttttacctagtcctaatactaaaacagattgattttgatatgttgcgatggttctcatcgaattcgccctcttctaaaaaattaacagataaattgctgaacagataatgctgaatacccagaaactaatatcaatacgccattcgctccaaccagacatttcaaagtgatggtggatgggactcattttaaagatacgtttatggaatagtttgaatgaagcaacttggagcatcacactggccgtttcaatgacataaacaaggccaattaataatagtgagaattcacggtgtaagagaattgacatggctgccaacgccccaccaagggctaatgaaccaacgtcacccatgaaaatttgagctggcttatgattaaagattaagaatccaatcaagcccccaataattgttaagccaaaaatcgcaacatcgatttgattttgtctaaaagcaataatcgtataagttgcaaatgacacaattgccaaaccagcaaccaagccgtcaatcccatccgctaaattaaccgcgtttgaaaagccaaccaaccacacgatgacaaataaactaaagaaccaactgctagaaattgtaccgattaacggtatgttcagtgcgtggctgaaaccttcgtggaaataaaccgctaagaaaactgcgccacccaagatttgaccagctaatttttgccaagcccgcaaaccaaggttttgttttttgaagactttgataaagtcatctgaaaaaccaagtaagccatatagtactaggatgaataatgcgatccataagctattggtcaattgttgcaaccagatagcgacccagatactagaaattactgcggcaacgatgaacaccaacccacccatcgttggtgtaccgtttttcttagcgtgccacttaggaccttcatcacgaattgtttgtccctcttttttaaaccgtaaataaccgatgaataacggcatgaagatcaccgtaatcacaaacccactcattaggggtattaaaaattgtcccgttaacatgatataaactcctttaatccactcttatttgactattttaattgtaccttaatttgcttgacgccgtctaacaaactattaaccgctagactttgatgataagcataaccactgcctttgatatccacatcgatccccgttaattgcgctagttttagtaagtcattttttgaccaaccattaacatccggcatcgtcatcgcgccgttggtcatcaacaagacccgttggttcggcaaaatgacactgccggcttttggtaattgttgcacgacgagattaccgctacctaccaatgttgtctttaggttttgcgcttctagtttcttttgcgcatcctttgttgattgactcaagaccgaagcgactttaacttgttgttgcttatctttttcggcttccttcgtatactctagcgcccgtttcatcattggattaaagacttgcgataaaatggtttccgcactatccgtcatattacccggttgcttcattgtgatatataaaatgtatttaggatcatctgccggtgcaattcccgatactgagaagatatagttgcttgcaccagttaaatagccaccgttaggacccgtaatttgcgccgtcccggttttagccgcgattttatagcccggaatctggtaaacctgaccagtcccataatctttataaacgacgtcttccatattttgcatgactttcttagccgtgctggctttgattggtttaccggctttaatcggtgtgatttgttgttcttgaccaacacctgccaaaatttgcggcttaatcattgtcccattgttagcaatggcacttgtcatctgcaacatctgcatgacattgacgttaatcccttgcccaaacgaagtcgtcgcctgatcaagtggtcgttcatattgcaaggtgccggccgtctcacctggtaattcgatacccgttttcttgaggaagccaaatttttcaatataggacttccaagtcttggcacccatttcctgttctaatttgaccatcccaacattacttgagcgggcaaacgcttggttgagcggaatcatcccccacccagcggtctgccaatcactaattttcttaccactgaccaacacagaacccgatttatagtattgatctggattatagtgacctgaatcgatcgcagctgataacgtcgcaatcttcaaaacagaaccaggttcataaccatcttcgaccaaagtatcgcgccaaacatcaccaataccttttttagtacttgcattaaaagttggtcgttgtgaggccgctaaaatttcaccggtcttagcgttcattaaaacggcgttcatgctagccggttgatatttcttattaactttactcaacagactttctagataggattgcatccgtgaatctagtgttaaatacacatcttgaccgttcttagcggctttgactttgtttttgttctgattaatcgaatagccatacgaatccttcgtcaaattcttatagccatcttgacccgttaattgttcgttgaaatacttctcaacccccatgacgccaactaaatcttgactaccactatcttctgaacctttaggcgtttgtgcaatccccacaacgtgcgatgcaaaagtcccattaggatacaagcgtgttggtgattctttaaagtaaatcccggtcaaatgttgcttttcaatttttcgtttaatgctgagtgataaattctgcccggcactcccaaattcaacttggtaaacagctttatttttaggcgtcaattgcttataaatattagcttcactcattgggaggtacttgctgagcgcctttgctgttttcttcttatctgctacgtataatggctttttatccgcagtcacataatcatgactcaaaaccgcataaacggcataggcgttggtatcttgtgctaaaacattgcctgatgaatcataaattgtgccccgttgtgcccgaatcacggagtcgccttcatatttcttgttcgatcgtttagttaaatcaacacccgcaatatgcccggttgcggcgatgtacgcaaaacgacccatgaaaatcagaaaaatcgccgcgataatcagcaataaaacttcgccaaatatgcgtcgattctgtcgtggactcctatgtgtcctaaataaatttctcatttagccacattccgaatattgttttcgtttaatttcagattatttttcttagcaaaggcatctaaacggtcggagcttgttaattccccgatttcttgttttaaatcattatttttagcacgtgtttgactcatatcttgagtggtattttctaatgtccgttgtgcattaaccaccgcgattttagtcgagagtaagcttactagcattgcaaaaaaagcaatcccgattacggtaacggctaatttttcaagtgtggaataagctactttttgagttgtttgttgcgctgattgacgagcaggttcttgaacctgactcggaatactttctggggtcgttagttggcgagctgcattggttgccatcataatcattccttctagtctatttctttttgtttttcagctactcttaacttagcactgtgtgcccggtggttaaccgttaactcgtcttctgttggtaggattggtttgcgattaaccagttttaaaacggttttttcggtgcccggcataatcggtaatcccttaggaatatctggtaatgtcgcttgttccttaaacattgttttgactaaacggtcttccaatgattggaacgtaatgatgctaattcgaccacccactttaactaatggaatggcttgttcaactgaatcttcaattgcgcctaattcatcattaaccgcaattcggattgcttggaaaatccgcttagctggatgcccacccgtccgtcttgccggtgccggaattgcctctttaattaaatctgctaattggattgtcgtttcaatgggtgcaatttctctttgttgttcgattttacgtgcgacttgttttgagaatttttcttcaccatatctgaagaaaattttaatcaattgttggtaagaccattcgttaacgactgtatacgctgttaactcggcgccttgatccatgcgcatatcgagtggcgcttcttttttataactgaagccgcgttgggcatcgtcaaactgtggtgatgaaacacctaagtcgtataaaataccatcaatcttcgtgatgccttgttcagcgagtgctgttttcaaaaatcgaaaattactcttgataaatgtcacttgtcctgcatccgcatacttcgctaaccgttggcgactactttcaagtgcgtggtcgtcttggtcaaatgaataaagatgtccggttgttaattgtgacaataagtattcactatgaccaccaccacctagtgttgcatcaacgtaaatcccgtctggctgaacatttaaggcatcaaccgtttcttttaataaaacactttgatgtttaaatgtttctgtcatattgttaccatcctttaaaaatcaaaatctaacatattttcagcaatgtcatcgaaattttcttcagcttcttcactaaagctcgcccatttttcttggctccaaatttcgattcgattggaaaccccaatcagcacacattccttttctaaagaagcgtgggttgataatgcttggggaatcataatgcggccctgtttatccggggtacattgcaccgcagctgagtagaaaaaacgcacaaaagcacgtgcatcttttttagcgagtggcagttgttttaatttctcttccaactgttcccattcgctgagtgggtaaccgaagatacaattgtccataccacgggtcaacacgaattcagttcctaatgcttcccggaacttggctggtacaatcaatcggttcttcgtgtcgattgtgtgatgaaattcacccatgaacatatacttcacccctttacccacctcaactcattttagtctaccataatcccccactttctaccacattttgactaaaaaaaaccaaaatcttatcttttaggatttattcccactaacccactagccataaccattttgcaccttaatagcactgcctattaacgacatctcgttcactagtgaacaatccttaaatagatcgtcgaaccacaacaaaaaaggcctagggcaaaataccctagaccaatcatttaattaattttagaagtttaagacgccggttgctgccaatgagccaaaaataacagagcctactgtggcgattaacataacccaaacaaaaatcttggttatccgactaaaagtacttgtttgtttcttcaacgattccaccacctagtcttttttcttatcagcagtttacaccgaatcaatgcaaagtgcaacttagtcctttttatcttttcagaaagacggtacaatggggatattaactttcgaggtgattcaaatgccatttacggctacgttattctttattctattaccgttaatttgtttagccatcggttacggcttaaatcttgtattgcaacgctttttcaaaaaacaacttcactttgtcgactggctacccgtgccatttttaataagtgccatcgcgcttagccaaccatttttcaacaaagctggttggtatttctgcttggtcatctgcgtatggggcatcatttggagtctaacgcggttttattacgaccatgcgctttatccccgcaagtttttcaaaagctggtggcgctatgtcttattaatgtcaggcgcttggtaccttgcctttctcgttatcgcattgattgtaaaataaaagtcgcacgccaaattggcatgcgacttttttgatatcatttattgaaataatcaatcagcatcgataaatcagtaatcgtcactgtcggttgcgccgcaattagtaagcaatcaacgtcaaaataaaccgtttgaagtccagcgttaatcccggcttcaatatccaacgtgcgatcgccgatcataactgtcttcgctctatctaattgataacgatcgcagaggtaattcaaactgtccggcgccggtttgcgcgtaaacccgttttggctagtgacaatctccgtaaaatactggtcgagatgatgttccgccaaatatttttgagccgctgtatcacgatgcgtcatcaagaagttacgcccggtctgactaacccgttctaaaatagccgccgcccctggataaggttgcggtgcaatttgcgtcttcgcctcgagttgatgatattgttggtctaatgtcgcaaatgcagtccccgtttgatcggctaatgcttgtaacacctttttaattgatgtttgtttaatcgctttgtacaaagcattctgatcaactggtacttgttgttgctgataaaccgcaacgagcgcttttaacattactggataggtatcatagagtgtcccatcaaagtcccaaattgcattttgataagccattaattatccctcgtatcaaataaaatcgtcaccggaccatcgttgacaagggcgacttgcatatccgccccaaattcacccgtttcaacagtgattccagtagccgctagtttttggttaaataaatgatacattttttgcgcataatcaggttgccctgcccctgtaaaactaggccggttccccttcttggttgaggcatataacgtaaattgcgatactgataaaatggcgccattgacttgccctaacgccaaattcatcttccctgcttcatcttcaaaaacccgtaattgactgatttttttgacgaggtaatccaaatcggcctctgtatcgtcatcgcaaatgccgactaacagtaaaaagcccttgttgatttgaccaacgacttgttctttaattgtgacacttgcttggctgacacgttgtaagactactttcatggttaacgactcctatccttgcactcgtttaacttcgtaaacatctggaatatttttaacggcttccataatccgttcgagatgatcaatattgcgaatcccaaccgtcacatgaatatcagccattttatcatggtcaatccgccccatgacattgttgagttgtttgctgtgtgcattcaacacttgtaagacatcgtttaataaaccgccccgattgtaaccatagacctctaagttggcatcgtagagttgatcatgtttagcggacgtattttcccaactgacttccgttagtcgactgttcatatcggcacgatccacgatattgggacaatcacgacgatggactgaaacaccacgcccttttgtcacatagccaacaatatcgtcgccaggcactggattacagcacttgcttaagcgcatcaacacattatcgacaccttcgatgatgacgccgtcttcatgtttaatcgtaatatgactaccagcagccttttgacctggtttttgagaatccttggccgataaaatttcagcttctagtgccttttgttcattctcttctttttcacgacgttccttaagtgttaatcggttcaagaccgcttgtgctgagatttcaccaaagcccaccgctgcaaataattcttcttctgaattaaaattaaagtgcggcaaaatgattgctaagctatccttgttcagatgtgccttcacagtatgaccttgttctaacaacaaatgttcaattgctgtccggcctttttcaacattttcatcacgatcttcttttttaaagtaccgttttactttattacgagcacgggctgtgaaagctaacttaatccaatcccgacttggtgtcgcactagttgaggttaacatctccacaatatcaccgttacgtaattgataatttaatgggacgattttgccgttaatcttagcaccaaccgcatgattacccacttccgtatgcacgagataggcaaaatcaattggtaccgagccttttggcaactcgtaaacatcgcctctaggggtgaaaacgtagacgcggtcgctgaagatatcgcctttgacactttccataaattctgatgcatcatctgaggcatcttgaatttctagaatttcacggaataaatctaacttacggcctgattcatctatcttaatttgttccttaacgccttctttataagcccaatgtgccgcaaccccatattcagcaacgttgtgcatttcttgcgtccggatttgtacttcaagtggtttgcctttaggaccaatcaccgttgtatgaatcgattgatacatattcgctttgggcattgcaatatagtctttaaaacgaccgggcattggtttccacttagtgtgaatggcgcctaaaacagcgtaacaatctttaatcgagtcaaccactacccgaattgcgagtaaatcatagagttcttcgaattgcttgtgttgatcgcgcatcttgcggtaaatcgaatataaatgtttaggacgaccgtaaatttcgtagttcatgtccaaatcggcaactgaatccttgatgtcttcaattgcttcttgaatataagcttcacgttgtgtccgcttagaattcatcaaatgaacaatccgatagtattgttgtgggttaagatagcgtagcgaaatatcttctagttcccacttaatcttactaatccctaaacgatcagctaatggcgcataaatttccaacgtttcattagcaatccgccgttgtttttcgggtttcaaatgctttaacgtgcgcatattatgcagacgatcggctagttttaccataatgacccgtaaatccttggccatcgctaacaacatcttccgatgattttcagcgagttgttcttgatgcgatttatacttaattttccctaatttcgtcacaccatcaacaatgactgccacatcttggccaaacatctcttgcacatcacctaaggtaatattggtatcttcaacgacgtcatgcaaatagcccgacgcaactgtcgccggatccatcttcaattctgctaaaatacctgcgacttgaatcggatgaataatgtacggttcacctgattgacgtacttgttccttatgcacatacgctgcaaaatcatacgccttttgcacgaaagcaagatgctcagcattcatgtatttctgacatagctggatcacttcttgctgtgaaatcactttttcttctgacatcttgcccaactccaattccgactctactaaaatttgttttttaaacaacaaaactggctcaacagtttgtcgagtcagttttatttgcgacgttcgtacgcagtattaatacccaaataacttaataagaagtaaattgggacaaaccaataattataatctgcgaagcggacaacaaccattaaggcaaataaaactggcagataaaaaatattataccaaggggcgtgtgttttctgaatgcgatagccgatgaaaaaggctgcacagccattaattgccataaacagcaacccaatgcgccacgttttactaattgataaccaaccgaaaacgagtggcaatacaacggcaaggagtaacgctactaagaagtaacggacccaaacttgctttaaaaagcgattatttttaattttatccattgtgaagcccctctataaaaattattattacctatcatactataaagtactcaattctgtcacatatgaaattgcgcttagtagatatagcggtgctgtttcggcccgtaaaattcgtggtcccaaaccagctaacaagaaacctgctgcttgtaaggcctcaatttcctttggtgcaatgccaccttctggcccaaaaacacagattaaactttgccctggttgcgctgattgtaggctttgaaccaattggccgtgttcaccggctttggctgattcttcgtacgccactaatttaatgtccgctgattcttcagcaattgccgttaaactcgcgcgccattcaatcgccggcacatgggttctatgcgcttgttcagccgcttcttgggcaatcttttgcagacgcgctagtttcttcacctgctttttagcatcccaacgcgctactgaaaattgactattacaaaagataaagcgatgtgcgcctaattgcgtccccttttgaacgatccaatcggtcttatcacctttagaaaggccacagacaatcgtcgtttcaatcggcagctcaacatctgtttccacggctgattcaactgtcacagtcgcttgtttttgcgtcgcatctgctgattgcaattgtgtgataaaagctaattcttctggcgtcacgatttcaatctgatcgccaacttgcatccgcatcaccttgagcatatgatgcgccgtttcaccggttaattgtaatgattgaccaaccgtcacggtttcttcaataaaataacgttgcattcatttgacctctaatcttcgtccgtctttagccgggtaatcaagccgacccaatcgcccatatgaaggctttcttcaaccattaaaccgttagcgctcaatgtttcgcgaatgaccgcttctttttcagtgataatcccagccaataataagtggccgccttcttttaataaggccggcacttgtggaatcaggggcactaagaccactggtaacatattggcgacgattacgtcagccgcaccagtaatgccgtgtaataaatcgtttggtttggcaatgatgccttgtgtaacggggttcaaatcaaaattagccaccgcggcatccactgcgacttgatctacatcgtacgcgcgaatatcttgaacacctaaatgagctgccgcaatactcaagacaccagaacctgtcccaacgtcgatcaattgttcaccgccgcgtaaaaccatttctaacatttgtactgaaagatgcgtcgtaggatgcgtcccagtcccaaaagccatccctggatccattcggattaaagcttcacgttcatctgttggttggtaatccgtccaactgggcacaaccgttaagaaacgggttagacgggttggttgataatactttttccatgcagttgcccaatcatcatcggccacctgttgtagattaacgctaccttcaccaattgataagccgaattccgtgagttgtaacacgcgttgacgaatcaacggtaacttttcaggaacaaaaaccgtttctgggaaaaaggcactgactgctgccacatctccgactaaagtatcgttaattgaggcgtcttcgatttgaatgccctcggcgccagcttcggttaaaatatttgcgatcgcttcaactgcttcattgacagttgcaactgtgactttcgtccattccatgtattctgctccttaatgattaaaacaggccaaaagaatttgacctgtcgctgaaatctattcttagtatttagggtaagtgtagtattttttagctaagtcatcactggcttgagcaacggttgcttggaaaaccgtgtcatcccagtccaagataaatgtttcgtcatctgattcatcgtttacaaaggcagctaaacgatcttcaccatcatctaataggtcttggagataattgaaaacaccacgcccgacttgggcattcaaaccttggcggccagaaaatggaatgacagctaaatagttatcagcatattcaaaaccgtcgattttgctttcatcgaagaataaaattgcatcttcataactaatttcatctgattcatttaattcgccattttgatcttcgacagccaattcttggctcttcgtcacatttaacgtgaattctaattcgatcgcccgtgattgtttatcccagttgatgttgatatcgccgctaaattgtaaatcatctaattctgcttcaaaaaattctaacatgtttttttcgaccataattgtcaccgtatcctttaatttgttcattcatcggctatcaataacagccgaacacctgctaatatcatacctgattacgcaatgaatctaaagcacttatcatctgaaacacaaaaaaagccgtgacaattgtctccggcttaatcgatttctgattgaaacgtccaattttagtcggcctttttttggccccaataattaatatccattgtattagcatcataacggtgaaattcaatgcctaaatcttcaagcgagtgactcataacccgcccgtataaacgcatatcagcttcttccgtattatccgctggtcgaatcgcgtgcattaaaataaacttcgccatttcttcttgaaccgatgggataatctctgacaaaggatcaaagaccatcgttacgaaccgaatctcgttgctatcaccatcttgcgtgagtgaaacaagtggaaaaccgccgaaattctgtcgctgtcctaaataggctagtaactgatcaatctgttctttggtaaagcctgatttataaaaaagaaaatgccaagtctgtctattcataatgtcacctgctcaaatttaaattacctttattatgccatatcagcggttgaaaaactaaccatagaaatcgcatgtaaaactgtgttaatttgttcacgttgtgtttcttgatcatgacgcgccgctaaaacttgcgcataaacttctttagaaggcccttcaaaagaatgaaccatcgtttctgttgcatcaacgtagtgttcaagtgccgtaattaattgctgattaatcgtgacaaacgcagttggtggttgcaccgcagcgacttgagtaacaaatgcccgcaggaccgttaaattttggtcaacgtaatgatccagggtcgctaacgtttcaccgactgtgcatcttcctaaaataatattcctacaagtttgcgtacactcgaaaaacaccgtttcaaatacaacgaatctctcgagcagttggttcacctgaaccacatagcttacagccggtattgtcttggttgtcatcgatatccgctcctttaatttttcaattagtcaataattgacttaagcatagattatcaaaataattggaatttattaaagaataagctcatacgaatcactattttttgtgaattggttgctgatatggtttggttaaccccgaaaaggccacccgaatcttctgataatgcgcatcgttatcccttgcttgactgaccaattgcgtaaaatcatgtgcttgaacaccacttactgtttcttgccgttttctaaaccatttcatcacaatcaactccttatttaaagtcattatacccctattcaacattaatggcggtccttaaatttacatttttaacaaattgccgtaaactaactataatcactaaaggagtggcatctattttgggtaaaaagaaaaaacaaggacaactcgcaaagacccttgtcgaaaaaatattagacaaacaaaaggtcgcctatacacaatttgagtttccaacacacgaagaacatcacgtcgcacaaatgcaggtcgatcacttggatattgatgaacatctcatctataaaacactcgtgctctcgggcaaacaaaccggcccaattgtcggtgtcgtccccatcgattgtcatttggacgaaaagaaactcagcaagatttccggtaataaaaaaatcgcgatggtccctttaaaggatctcgtagcaacaaccgggtacgaacatggcgccaatacgcccgttggtatttgggaaaaagcacattttccaatctatatcgaccaacaagccgaaaaagaacctttaatctttgtttcatcaggtaaaattggccgttcaatccagattaacccccaagacctgagccgggtggtctcaggcactttcgcagatattagcgaagactaaaaaaaggacatcaatttgccaatgtaatcactacaacgagtgatttaacattgcgaatcgatgtccttttttaattcatattaatctaaatagcctgctaagttgtgattagaaacaatcaccttatccttcaacaaggttggcgtcttcacaatattgtgaatgaccgtttgtggggtcacacccgcttgcgctaaagttgttagtgcatcggattttaccactaccttcttaatcgactgacatagtttgatcgttgcaacatactgtccctcatcttgcgcttcggtaatctcgtatttcccataaaaatgtttgttcacggtcactcatctccttgtaaaaaggataacacagttaatcgttttatacaaattactaattgtacaataaggtaaaactatgtgttcggagaacgattacatatcaccctacatttagattctatttttaatcacactctattattttctttttcttctatataattaaatgatttttataacaagttttgatatactaattaacaatgtgaaaaagtggttttatcaataattattattgagtccaaatactgacgacttaaaaagctgtatatattattggaggatttgaaatgagcactaaaattaaaggtgcagacggtaaagtttacaaacaagtcagcgagaatcaagaaagccaacattcacgtacagctgaaatgattttgggaatcatgggtggcgtatttgggattatcgctggtgtcttttcgttcttaatgggtggttttgacagtgcaatcaacaatacttcatcaagtagcttgtttggattgggcttcggttgtgttgtcgcaagcatcgttgcaattattttagtatgtatgattaataaaaatcgcgttgtgatgggttggttaatcattgtctgtggcattttaaatattgtttttgtttcagcatttggtgttttaagcggagtattaataattgtcgcaggaattcttgcacttattagaaaataattttttgggggtaataaattatgtcaaaaaaaattcaagatgaaaacgggaatacttttgtagaagttaaacctttgtataagcgctggtggatctgggttctagcagttgtcgttattatatttattttcgcagcactttcagggggtagcgatgatactaaagaatcaaatgcaacagctcacacaacaacttctgctgaaaaaggaaattctaaaaatagaaccgataattctaatagtttaacgattgactataacaaggttcctattatttcggaaaagacttacaaactttccgtatctgacactacttggaactcggcttctgtttctatttcaagcgcaagagtcattaaagtaaaaccttttgaatacaattcagaatccggtaaaaaggctgaaggtttaattattctaaatgtagcagttaagccttctcgtgatttaactgctacattccctgatcaaggaactatcattacaaacgacggacaacagcaggaggctattatgccttctatgaagggtgtaacaactaattggggtggagatatcgctaacggagccaataaatcgggtgacgtcattttcccactagaaaaactaaataatatttccgatattaaatctttaagatataagtttaatgctagctatgatactgatgattacgaagatgaaaattctaatcataactatgatttaactattaatttagactaattataaataccctccactctggtgagacagccgcgttcgattcgcggctggggattaggcgataactttccccatgaaaggaatcaataatggaactactactaactcaacacgaagctgatgatttaattgcatccctaaaaaaattaacacaaaaaacaactagaatcctaacagatggcgagcgcggaatagttaacatttcctcaaattctggaaggaaattttctttacggtacttctattcaagcaacaatattcatctacaatttatggatgaaaaaataaaattaactcttatcagaatgaatttaaatgatagttttcataaaaattctactggcgaaaagatatacggaaacagagttaatatattttcggaggatgaattttattcaaaaggagatggaacaacccatacaaaagcatcccctcttcccaagggcgttttaagaaatactagggatattctagaagcaatagacgacctttttaactatactaataccagcaaccgtgataaacttcaattaacaattccgcaaccattaaacttttaaattcgttagaaagggggataaaagatggatactcaggatttagaaataaaaagcatcgcaaacaactggtcttcttggatgactgggcaaacaaatttcaaaagactagataataataaaatacaagttattacaccttttgtagataatttcggtgatggtattctatttaatattatttcgaaagaaaatgacatttatcaagttactgacgagggttataccatctggaatcttacttctaatggtattaatgtgaaatcaaagcaatctaatagatggcgaatactgctttctattattaccccctataactttaaaattggaaagaatgatactatctttaagttagttaaaaagagcgaactatctcaaacgataacagattttattcaggttttaataaatgtttctgatattgcgtttatgaacagaactaatactgctagtgttttttttgatgatgttagagattattttaatgaaagaagatctgattatagttttttaaatactatttatgctgatggtaaaacaagccaaaaatataaatttgaatacttgttcactccaaaaccaaatgaatttaaactaactaaaatgtacaataccctatccaaaaattctatggaagcaattatcggtatttggagtgacacttccgggttcagagagaataactatggcaccaactcctcattcaatattcttataaatggtatatccgataaagaaaaaccattcattgatggacttttgtctcacgaaattgatgttattgattttcagaataagaatgaagtaaaagataaattatctattaaataaaagcccctgttgggttttttatttgtcactcaaaagaacatacgtttgcgtttgtaagctaattatttatgttttacccattccattaacatttatctagatttatttatgtaatttataaaattaaccattaatttccaagtaagaggtgtccctatgtttaagtatgataaaaataacgctattacagaatatattagcaaaggcgaaagaagatacctgtttagaatttatgttggtattaatcccgagacccataaaaaatcagttatcactcgtcgagggtttaaaacacccgctgcagctaatgctgaatttcgtaaaatagaagctcgggttaagaatgataagtatgtatttaaattaactgattctcctgctcttacctttcatcaagcttatttaaagtggtttagtgaatcttaccgaactaccgtccaatctagtacaatctacaaaactaagcagatttttgattgtcacatcttaccagaaattggatccatcccactaaatgaaattacgcctaagctattacaaccaattgttaatcgttgggcagataaatacgctaatcgtatttttaagtatgcttacacaatcaatttaataacatcgaatcaaaaagataaattaaaatatgccttggatgttaactttgactaatcaaaatttagccaaaaaccgtaatttgtatatttgcaataattgactaaccctatagaagtgactaacctttttgactaacctttgtcggcgtatataggacaatatgactttttaaattaaacaaaaaaatagccgaatcactgatttaacagcgattcggcttacataggacaatataggactttagcttaaggagagtacaggatttgaacctgcgcgccggtataagccggttcgacggatttcgagtccgttgcattaccactctgccaactctccataacagtagttattataccagatttataacaaactgaaaaggcattattctaacctatcacccactagaacatatttatgccactgaccctatgatcttctaaaaaacgtcgcttttccgagcgacgtttttattttcttattttattggtttaaataattatatagcccacgcatggttgcatcgtctaatgtcaatggtttaccatccaatgtgacttccgcaatttgaacatagtcttcaaagtctggcacttctagttgttgatttgccacaaactcagcagctttttgataaattttttcggcactattttgaccatttacatatttaatgactaacattgccttcatctccatttcaacttttaaactcattgatgagttgctcatctttgacaaattcatcatacatcacttactaaaaataagcaacgttttatcttctattaaagttgcatggttccccctattcccttttccccccaactccgctatactaatactatcttatactttgacgatagaggttctctcagatgaaaatatcaccttacaagtttcctttcttctttgattttatttttttagtcgtgacgctgttccaatcggctttaattttgatcctgaatccaccattttctaatttcttaccgacctatatggacgctatcggtaaggtttggtggttagccttggtggcgattcttttgcatgtcatcgcctacttgttgtcattagaacaaaatatcgcacttttcactaacttactggcgatcttaggttatttaacgttaattatcattcctaattatttattactcgctattattttcttattcgccggtttagtactggcactcaaatcatatatcgctcgtaattaaccaataaggggtcgaggcaaaagatacttttgtctcaaccccttttttatcgttataaacgtgtcatttcacccaatcaaaaccctgttaaatattattttgtgatataattagtttgaagataaaactattaggaggtctcatcatgaaacggtattttgttattttaaatctcatctgtttatttgcgctcccttttgtaagcccttacttattcgatagaggcatcgcgcgcaatcagactcaaagccgggttagttttgaaacacaccgtggccctagggctcatcatgcgactcctagcgataatgccgaacaaaacctcaataacttcaacaatcgtttcgaggcctacttcgatgaattaaaacaatcacctggtgcgctgcatgcattacttatcatccttggtctttcaatcattaccctactatgtcagccgctacttgctttgatggcgacccctaaaccggtccctatcaaaaaaacgcaaccggctgttccgaagaaaccacagattgcgtcttataagcgccatttattaagttagttgagactcaacttctgataggtgtaatggccctcttttaaagattggttggcatagggcgtttcatttaatagcgaaacgtattccttagcccgttgttccgagctaaacgcgcggatcatcttactcttctcataatagagtgggtttgcttgatacatgacaatataaatccaatggttcatttttcatcacctaacttacaaaataaccacataaagaaaggccgcctcgcaatgagtcggcctttttaaatgtcatcttaacgatgagcttctttgatacgagctgccttaccacgtaatgcgcgtaagtagtataacttagcacgacgtacacggccatgacgagtaacttctaatttagcaacacgaggtgagtgtaatgggaaagttctttccacaccaacaccgctactgatcttacgaacagtataagtttcactaacgccaacaccgtgacgtttaataacaacaccttcgaataattggatacgttcgcgagtaccttcaacaacacgcacgtgaacacgtacgctgtcaccaggacggaagttaggcatatctgaacgtaattgtgacttagtaatttcttgaattaatagattcatctgaatctctcctttttcacagatattcattaacgtcttgcgccagcggaataccgttgttttatgacttatcatcacagctatcaattttagcataaatcaaacttaattaaaaggcttatttttcagcggcctcttgtttaatttcacgtaaccatttttgttgatctgcggttagatcaaagttttccaataaatctggccggcgttcataagtccgtttcaaagacatcttgtcccgccattgattaatgagcttatggttaccgttcatcaatacttctggtacttttaagccgcgatattccggtggtcgtgtgtattgtgggtgttccaacaagcctgttgagaacgaatcggtgacggctgactgttcgttacctaaaacacctggcactagccgtgaaatggcatcaatcatcaccatggcgcctaattcacctcctgtgacgacgaaatcgcctaatgagacttcatccgtcaccaaggtccgaatacgctcgtcatagccctcataatggccacaaatgaatacgaggtggtcttcttgtgcaaattcttcggcaaccttctgattaaaagtaacaccagcaggatctaataaaataacgcgtttatgaccgggatttttagcattcacctggtccatcgcttcaaaaataggttgtggccggagtaacatccccgcaccaccaccataaggcgcatcatccaccgaattatgtttattgactgagaaatcacggaaatcagtgacttctagatcaattaaatctcgatcgatggccttaccgataattgattgcgataaaccattttgaaccatatctgggaataaacttaaaacatcaatcttcattatcaatcaatccttctggtacttcaacgtaggccttactcgcttcaatatcaatttttttaatgactgacttcaaaaatggtagtaataaatcggagcgaccgcgacgtttgataacccacacgtcattaggaccgggatcgatgatttctgagaccttaccatagcttgtcccctcagattcttcaatcacttctaaaccaatgatatcgccgtagtaatattcatcgtcttcaagttgatcatcacgttcacttgccgcaattttgaggttgtgtcccttaaataattcgacgtcgttaatgtttcctaagccttcgaattgtaataggtaaaattgcttatgttgacgcattgcagaaaccgtgactggtgttaagccattaggcatttcaaccgccaagtgcgttccctttttaaaccgttcttctgtaaaatcggttgtcgcaatgacgcggacttcaccacgaataccatgcgtattcacaattttaccgacttgatagtatttttctggcatttaatttctccttattcaacaaaaaacgcttaaacaaaacatctctgcttcatttaaacgtttgattaggcatctacaatatttaagcgaacgcgtttttgataaggtgttttcacactatagacaatggtccggattgactgcgctacccggccttgcttaccaataatacgcccgatatctgatggattaacctgtaagtcaaattccataaaacgttccgtctcatgttcagtcaatttgacatcatcgggatgttcgacaagtggctgaacaattgcaataattagttctttcacgtctgtcataacaaatccctactttttagcgaagcgagcttcgtgatatttttgcataatcccttgttttgataaaagattacgtactgtatcagaaggttgtgcgcctttttgtaaccagtccatgataacttcttcttctaacttcaagtcaacaggttctgttaatggattgtagtaacctacttgttggataaagcgaccatcacgtggtgaacgtgaatctgcaacaacgatacggtagaatgggcgttttttagaacccatacgtttcatacgaattttaactgacattaatgccacctcctattaattctttaacatgtcataatataccaaattttaaaggccgtgtaaagtgttttttctttacagggcgaatttttttaagatttaaaacgacgtgcgttcttaagacgttttttcttgttcttcttttgctttttcatcattgagttcatggccatcttgcccattttacccttgatgccgttgcccattaaaccttccatgccattaaagttaccttttgacatttggttcatcatcttcttggattgattaaactgtttgatcatccgattaacttcaacgattggccggccagcaccagcggctaaacgacgacgacgacttgggttcaataagtctggattttcccgttcttgcggtgtcattgattgcacaatcgccttcatgtgggtcatatccttaggatccatcttgatatttttaagttgggggttattagccatccccggaatcatcttcatgatatcttccaatggtcccatattttgcaattggtccatttgatcgaggaaatcgttaaaatcaaagctattttctttgattttttcggccatatcaaccgctttttgttcatcgtaatcttcttgcgccttttcaatcaagctcaacatgtcgcccatccctaagattcggctactcatccgatcaggatagaagacatctaattggtttaatttttcaccttgaccagtgaacttgattggcttaccagttaccgcacggattgaaagggcagccccaccacgtgtgtcaccgtctaatttagttaagacaacccctgtgatgtctaagcggctgttaaagccttcagcaacgtcaaccgcagcttgcccagtcattgcatcaactgttaacaagatttcattaggatgggctaaatcgttgatatcagccaattcttgcattaaggcttcatcgatttgtaaacgaccagccgtatcaattaagacgtagtcgttcttttgtaaagcagcttgtgccaacccttgacgtacgatttcaaccggattaacatccgtccccatttcaaagactggggccccaacttgttccccaaccgtcttcaattgatcgatagcggctggacgataaatatcggccgcaatcatcaacggccgtgctttttcatttttaattaaataagtggctaatttcccagcagtcgtggttttcccggccccttgaagcccgaccatcataataatcgttggaatttttggtgatttgttcaacggtacagccgtttcacccatcatcttggttaattcttcatcaacaatcttaacgatttgttgtgctggtgagagactctccaacacttccgttccgattgccttttccttaacgactttaatgaagtccttaacgactttaaagttaacatcggcttctaataacgctaagcgaatttcacgcatcgcttggttgacgtcagcttcagtaaccttccctttacgacgtaatttacttaatgcaccttgtaatctttctgttagtccttcaaatgccattaatgatcattcctttaaattgatttattgttcagtgagattcagcaagtctgccaagagtttggctaattgctgatcatttggatactgagcttgaatatacttctggagcgcgtctgcactagcgttttgctgttcgtaattttgaaacagatgcaacttagcctcatagccctcaagaattttttcagtccggcggatattatcataaaccgcttgtcgactgacttgatactcttcggcaatttcgcctaatgagaaatcatcgccataatataatgagagataactatgttgtttcgccgttaaaagtgcgccataaaattcaaatagtgaattcattcgtgcgttttgtgcgagttccatttgacgcctccaaatagtagattgacctaagtactagagtacctattttgacggggttagtcaacttttattccggattagcgcactaaaaaacacactctaaattgagtgtgttttaaattaatctagtgtgtctttgttttttgaattaagcgtgcgatattcatacttgtttgggttaaattagccttggtattagccaacgctttttccaatgacatgacccccggtgttgaacaaaagatactatcaatgcctaaatcatagagcacgtcagttccttcaccgatattaccggcaatcgcaatcacggttgcttgcggattaaccgctttgaccgcttgcgcgacaccaattggggttttcccatattgggtttggaaatcgatcccaccttcaccagtgacgacgatatcggcgtctgcaacagccgttttgagttgcgttttttcaatcacaatttcaacgcctggctgtaattgtgccttcgtaaaggccaacaaaccagcgcctaagccaccagccgcaccggcacctggtgtttgcgcaacactgatgcctaaatcacgttcgataatggccgcgtagtgcgctaagtttcgatccaactgtgcgaccatttcagatgttgcccctttttgcggaccaaagacggctgaggcacctttttcaccgattaaaggattagtaacgtccgacgcaatgacgattttaacgtccgctaaggctggtaacatcccagttgcatcgatgcttgctaagtcagccaaagcaccgccaccaaaccctaaggattgctggtcggcgtttaacaattgaacaccgagtgcttgcgccattccggcaccaccgtcattggtagcactaccgccaagaccaataataatcgttttaacaccttgtttaacagccgcttcaatcaactgacccgtgccgaatgtcgtcgttactaacggattacgtgtttgttcattaataaattggatcccactagcagctgccatttcaatgaccgccgtttcttggtcgcctagaatcccatattgcgcagtgactttttgtcctaaaggattcacaacttcagccgttagaaaacgaccccctgtggcatcaaccatcgattgaacagttccttcaccgccatctgccatggggacttcaacataagtcgcttttggaaaaactttttcaaacccggcccgcatcgcatgactcgcttcgatggccgtcactgaatttttgaatgaatctggtgctaatacaattttcattttatccacctcatagtatgccgtacattacaacggccacaattgtcattgtcaaaccaacacatgcttcccaaataacggcttgcattctttctttaaaactcatctgcatcgcattagctgttacgtggaagtaattaccatgtggcaattgatcaatgaccatcgcaccagcgtgtaccataacagccgctcctaaagcaggaatcccaaaggctaaaattggtttgctgaatgaaccagttgctaaaataacacctgttgatgtcgatgctgtcgcagccgacattaaaattcctgaaattggtgctaagaatgtcccagaaatcccactcgctttaaccaatgaaaccacttgacttggtaagtttgaagcaccgattaacccggcaattgaaccggcaccaattaagattaagacaacatctgtcatccggttcattccggctttcatataatctaataaatggctagcttttcccatcgcaagtgttccgacaatcccagcaattgggaggatgtacatagcgtcaacttgaaaactttgtagcgctttgagatgtaaaatattgcccattggattaatgagtaacaagataattgccaatagcggtgttacaatggccgtttttagactaggaatatctttagttgtcgtttgttgttgtgcaatatctgcttctgtaacctgtgtgcctttgtggcgtagcaacgtcgctaacaagactgccattgctaagccaaaaagtgcaggtataaaatctgccaccatcacttggcttaattcaaggttaaatcctttagctgcagcgattgtattggggttaggcgaaatcagattaccagccttaccaccaccagataacgccactagcaaggctaatttagaaatatgcattctttgaccaacctctaatgcaattggtgccacaattaaaacggcaactgggataaaaaccccgacaccggtgataatcattgttgctaaggttaacgccaaaattgcaaaacgatcacccattttttcgacaatcgcccgcgcaattgcatccgctgcaccggattccatcatcacaccggctaaaacaccggccgccaaaacgcggatgaccgttcccatgacgctctgtgcaccagtaacaataatgtcaacggtttgcgctaaactagcaccgccgactaacgcccccacaattgtacccatcaataatgcataaaccggatttaaccgacttaaaatcaaaataatcgctactgcaagcccaatcagagctgcccaccaaataattgtcatttctaaattaccctcccgttttgttatataacacaatcattgtaatcggtaacgctgctatataacattgacagaatagctaactttattgggcacttgcacaactattgtaattcataattcaaaaaagccgtatataaaataacaagttcatcgtatcgcttagggtccagacctaacttatctttaatctgacctagccgataattcaacgtattacgatggatatgcaattggtgggccgtttccacaatattgccattattcctgaagtatttttgaaaagtagtaatcaatacctgtcctgaatccgtctgcgcaagcactctaaacttttcaacgtactcatccacgactatgtccgccgataataatcgataggcataattaacttcagctgtatagtacagtaatttttgattcgtgccttgattgtacttaattacttcgcgggcttgctttaaagcctcactcactagcttctgtggttgactaatgcccacagcggcttggacttctttcgcattttgatgccagtgtgctaatacttctgcttggcgcgttaagattaataattcatccggcgttattcgcaatttatagctaccaacctcaaccgtttccggtaataaatgcggtgttttaataaccatcgcctgatattgctcatcaatattaacgcccaatgcattggcttcttgcacaaaatcaggtgttaacgcagctggatcttgaattgccaaccaatcaaataaaaaccgctctaagcgccgttttgctcgtgataacacttgatcagcgagtgcctgttctgttaagagctcggtcgtcactttgaccagtggtgcaatataagtaagcttctccggagcacctgtaataccaacgacaccaatcacttcattttgcaccacaatcggcatattaaagccacgtaacgtcccatctggttgatcctgttcaataatattagtcttttgaccttgaatcgcttcaatcgcccccgggtggctttgaccaactcgactgggttcaccactagcaataatcgttccttgctgattcatcacattaatattgtacggaatctctcgatgtaaccgcgcaacgactttttgcgccagcactttatccatttccattttcaaaaaccaccttattaaaaaagtgtatcaagtaggcctatagcccacttaatacaccttttcaattttctatttaatcgcctgactaacatccgtatcaatctcactttgtgggccatctccgacaataatgtctttgaataaaccgtaaacaaagcggttaggatcgaataattgtaagtcattcatttgttcacctagaccaaccatcttaactggcaagtgtaactcggtccgaacagcaaggacaatcccacctttagcggagccgtccagtttggttaacacaattccggtgacgtcagtggttgatttaaattgtttagcttgaaccaaggcgttttgcccagtcgttgcgtctaatactaacaagacctcttgaggggcgcttgggatttcacgcgtaatcacgcgtttcaccttttcaagttccttcatcaagttgacgttattttgcaaacgaccagccgtatcaactaataagacgtcaaagttttcttctttagcccgcttaacggcatcaaaagcaacggcggctggatcactgcctgctttattagcgaccactggtactgaaacacggcggccccattcttgcaactgttcgattgcgcccgctctaaacgtatcaccagcggcaagtaagaccttcttaccggctttttctagttggtgagcaaacttcccgattgaggttgtcttgccggcaccattgacgccgacgaaaagaaagactgtcaattcaccttctggggcgaaatgtaattcattatcttcttgttgtccttcttgaccgtataaatcgactaatttttcaacaatcgcttgtgaaacggcttctggtttcttaacgttgcgtaacttcacttcttcacgtaattcgtctgcaattttcattgctgtttcgtaaccaacatcggcttcgattaacatttcttcaacgtcgtcaaagaaagattcatcgacacttctgaagttagcgaacaaagcgttcaaccgttgtccaaaagtcttccgtgatttttctaaaccttgatcatatttttcagtttgagctgcttgaacgggttcagcttctacatcatctgccaccgctgtttcttccatagctgttggttcatcggtagcaacaactgcctcttcaggcgccactgttgcttcaggttcagcaacttccggttctgtttcaactggtgttggtgtctctgcaatcactggttcagttggttcttcttcgactggcacttctggtgtttctggtgtttctggtgtttctggtgtttctggtgtttctggtgtttcgtcaaaataaaaagcgcccatacaattggtcaactgaccacctgtacaagcgcgttattataacgtatacaaatgaaaaaacagcctaacttgatttacttcttcttatagcatagcacttatctgagatttgttaagggtggattaaaaagattagcaatcagcggtggcaagccattttaggtaatcctgttcacgattaatcgcatgttctaaaatcagatagtggccataattggcagtaatcgttgcttggttagggaagacaagcgctttgcgggccaataaatgggtgagcttatcggtgtgcaaggttgtttgttccgcaaacatagcaggtaaatgttgatcattttttgattcgataaaatagagtttgaggatgaattcatccttgctagcgagaatttcactggtgggtgagtagcgccactcgttgaaataactaacgccactaggggtaattgtgtattgtttcttcatgagtttagtgccagaaatgagttcgatatgggtaatcaggtcttcggtttcaaggcgttttagttcgggatagatttgactgtgtttggcctgccaaaattcaccaatttcattttcaaaaacgcgtttgaggtcgtatccagttttgggcgcctgatttaatagaccgaggagcaagtactggagaatatttttctgtgccatatagaagttcctttctgagcgaaatcttagttaaagtatagcataggggagcgaaatcgttgcaattagaatatagttactttttgtaagtctttttaattgaatttcgagtcagtttggtataggatagctgaattgggtgtctaatcaggctattttctgagggagatagcaataatactaataatagaaggaggccatttaatggctaagaaatcaaagattgcaaaattagcaaaacaacgcgcattggtcgcaaaatatgcggatctacgcgcgactttaaaagcggaaggcgactacgctgctttagcagaactaccaaaggattcaagtccagtgcgtctacgtaaccgggacttaattgatggccgaccaagaagttttatgcgtaaattcggcatgagccggatcaatttccgggaattagctcacaaaggccaaatcccaggcgtcaaaaaagcaagctggtaaaaaagtaagtgcgttaattcacggttagcttttgaggatttgcataatcagacggataagcgccaagggcgattgtctggctgatgtagcaaagcgcagaaagttgtgaattaaaagcacgttaaaaaagtaagtggtttccagcatagggatatttcgaggattagcatagctgcgtaaataaacgacgaagtcgcttatttgcgtggcgtagctaaccggaaaaatatatgctgaaaagcacgttaaaagaatgagtgctggaaaagccggttaacttacgaggattagcaaaattagacgaataaccagctttgctggttgtttggctaatggtgctaaacgcagtaagttggctttggaagcacgttaaaagctaagcacaggaacctaacttgaaaaacatgttaaagaggtctcttcgagacctctttttctatgtcttgaacttgcaacgtttttttgatatattggtaggaattgtttaacaagtcaactaaattaaatgaggagggttgaagatgagttattcacaatttatccaaagtgcgaccgtaagtgactaaagacgtttttcagcagattaaattaattaggagttttaaaatgaaaaacgtctcaaaaaaagcccatcaattctattaatgattgtgttggtgggatttccacaaattagcgaatcaatttttacacccgtcttaccgatgattagtcgggcctttcacgtcagtgcgcaaacggcacaattgacgatgagcacctattttatggcctttacctttggtgttttattctggggttggttatccgatcagattgggcgacgactaaccatgttgttgggaatcggtgtctatctgcttggtaatggcggcctgctattagccggtcattttagttggttaattctagcgagattagtgcaagcttttggcgcgagtgttggttcagtggtgacacaaaccattatgcgtgaatccttcagtggtgtgcgcggggcccaagtatttgccaaagttggtgcggccatggcacttgcaccagccttaggcccgttgattggcggtcttgtccaaacctattttggttatcgccaagttttctcggtgttaattatgatggcggttggcgcgattttatacgcgggtgcgtgtttaccagaaacgcggccagctggtgtgccggcacaggtcaatatcggggcagtgacgaaacggttactaacggataaaaaagtctgggtttacggggccgtgattagcggcatcaacggcattctattcagttattatgctgaagcgccgtttatctttatcaatcatttccatctcagcacggttcaatatggctggttaggccttgtgttagccgctgctagcattttaggcgcaatgactatcaattacggcgcacccaagtttggcgcggtgatgatggctaaaattggcttagtactcgctttaatagggagtctattattgttggttgccagttattatgatcagctgttgttgatggtcatcttaattctaatcgtcttttgggggttgaatacgactttaccagttgttttaaacctggcattagtcggttatgaagcggtgattggcactgccagtgggctatttagttttggttattaccttgcaatcagtgctttgacttacggcatgagtttgttgcatacaggcgcaatcagtcgattgccattgtatatcgtaacgattgtcgctatcatggcactttggtatgggttagtgatccgaaataacgaagagtaattaaaaaggacctgagacaaaagcaattttgtcccaagtccttttttgatggttaagaatggcgttgttgctcaaggccagctaggaaaatatctaagcccaacatgaatttttcggcggagtgttgctgctgttgccggtggtgttcgaacgtttttaaaaaagcgtcgaaatgattgtcggcagcgattgttttcatcttcagcgggagttgtgcgagataaggatcagtttgactgagcgcgcgttgcttcatctcaattttccccgcgatatcagcgaagaggcctgacatgaagtggtcgatggattcaatcgccaggttactttgttcgggtgtgaagccggcgtctaataagatttgtaagaggcggttaatgagacttaggcggattttggtcgcagggacggtccgcaacattaattcggctgcgtaaggctgttcaaggtaggtggcataaattgttttgaagatcagcttgatttgtttcgtccaaggcatagccgtcgtcgttggtggaaattgaatcccggcgataatctcgtcagccattgcttgaaggagggcctgtttgttttcaaagtgccaataaaaagtcgcgacaccaatgtggagcttggccgcaattttacgaattgagagttgttcaactgtcccgcctgtttgcataatttcaaaggcagcggccgtaatttgggctgctgaaattgtttgtttaaccatcttaataaaccgcctttatttttcagaaaaaagaattgtaattatttttaaaatttgttaaagtattaactcgaacactgttcgattatactgtacatgacttgtacaggctaatcaacttataggaaaaagagggatgcgcatgtcgttattgaaacagcacttgaagccatatctaggcgtttttagcctatctatattagccaccattatatctgttgcgtcttcactatggcaaccaaaactattacaaaacgttttggaaggcattatgaaagatgatcaagataaagtgatgcaaattgggatttatctcatcgtgattgccgttgtcggtttaattgctggggtggtcaatacgattacgtcggcgattaccgcacaagggatgaccgccgatattcgggaaacgacttttagaaagattcaaactttttcatttgctaacattgagaaattctcagttgggaatctttctgtgcgcttaacgaatgatatgacccagattcaaaatgtgattatgatgtccctccaaacattggtccggattccgattctatttgtcgggagttttattttagcgatgaactcaattccgagcttatggtggattatcatcctcttagtggtcctcgtttttgtgattacctttttatcaatgggctcaatggggaagcactttggtgcgattcaaaatttaatcgataagattaacaacctcgctaaagaaaatttaatgggcacgcggattgtgaagtcctttgtccaagaagataatgaaattaatcgcttttcaaaaaccagtgaccaattagaaaaacatacggcggttgttggaatgctcttttcagtgatgattccatcatttatgttggttgctaacttggcagttgttgcttcaatttattttgttggcaacttagtcgatacagatccggaagcaatcgctgcaattgcctcatttatgaactacttaatgcaaatcatgatgtcgattattatgggcggcatgatgatgatgatggcttctcgtggggcggtttcgttgaaacgactccaaaaaatcctctccacagatcctgatattgtgtaccctgatgtgccagatcaagacttagctgggaccttagcttttgagcatgtcagcttccgttatccagaagatgatcatgatacgttgaacgatattagttttgaaattaatgcgggtgaaatgatcgggattgtcggcgcaactggtgccggtaaatcaacgatggcccaattaattccgcgtttgttcgatccaacaaaaggggagattcgtatcggtggggtcccaattaaggaattgaacgaacataacttacacgattcagtgtcattcgtgcttcaaaaagcgattcttttctcaggcacgattgcccagaacttgaagcatggtaaaaaagatgctggtacggctgatatggatcgcgcgactggcattgcgcaagccaaggaattcatcgagaagttagccgatacgtatgatgcaccggttgaagaacgcagtgccaacttctcaggcgggcaaaagcaacgcctttcaatttcacgtggtgtgattggccaacctaagattttaatcttagatgatagtacgagtgcgctggatgcccattctgaaaaactggtaaaagaagcccttgatcgagaattagccgatacaacgacgttgattattgcgcaaaagatttcatcagtggtcaatgctgatcgaatcttggttttagatgaaggtcgcctagtcggtgtcggaacgcatcatgagttgttagaaacaagtgctgtttaccgcgaaattttcgaaactcaaaagggaaagcgaggctaaattatgaaagaatttaaacgtgccatggtctttttctaccattatttaaaacgctataaaccatcttttgcgattatccttgtgatgaccgtctttgccacttatttacaagtcaaggcgcccgaatatattggggatgcactgaatgaactggttaaatacgccacgaagtttcaggttttaaaagcccagcatttaccaaccagtggggcttctaaagatgcttttattgatgtcattgtgtcgttagtccttttttacgtcttgagttcagcggcaacttttgtctcaagcgccgctttttcacgcgtcaatgcgttatcgaccaaccggatgcggattgggttattcaataaattacaaaagatgcagattaaatattttgaccgccattcagatggcgatatccttagccgttttacgagtgatttagataatatttataacgcgatgaaccaagtgttaagccaattggtgtcggggacggccttattgattggtttgctaattatgatgtttagaaaagatacccaattggcgtgggtcacaatcgcgtcagtgccaatttcgtttattttagcgtggatcattatcaacaaagcgcaaaaatacgttaatgtgcaacaagatgaagtgggtaagttaaatggttatatcaatgaaaaaatcacaggtcaaaaagtgattattaccaacagcctacaagctgaaacgattgatggttttgttgaacataacgaaagtgtccggaaagcgaccttgaaaggccaaatttattcagggatgattttcccattgatgcaagggatgtcactggttaatacggcgatcgtgatcttctttgggagctggctagcggtcaacggggatatcaaaaaatccgttgctttaggattagtcgtgactttcgtgcaatattcacaacaattctataatcaaattgcgcaactctcatcaagttacagcatgattcaattggcaattaccggtgcgcgccgggtcaacgaagtctttgatgaagatgatgaaattcgtccaactgatgggcaacaattcaacggaattgaacgttcagtaacgatggaacatgttgattttagttacttaccaggcaaacaaatcctgcacgacgtgaatattgaggttgataagggccaaatgattgcgttggttggaccaactggctctggtaagacgacggtcatgaacttgatgaaccggttctatgatgtggatcaaggcgccgttaagattgacggcgttgatatccgtgatatggatttggatacgttacggtcacacgtggggattgttcttcaagaatcagtcttatttgcagggacgattcgcgataacatcgtctttggaaaaccagatgcgactgacgatgaagtgattgcagcggcgcaacaagcgcacattcacgatttcataatgacgttggaagatggctatcaaacgaaggttagcgaagaagacaacatctttagtacgggtcaaaaacaattgatcagtattgcgcggacgattatcacggatccagcgcttttgattttggatgaagcaacaagtaacgttgatacggtgactgaaagccatatccaaaaagcaatggaaaacgtgattcagggtcggactagttttgtgatcgcccatcgcttgaaaaccatcctaaatgcggatcggattatcgtcttaaaagatggccgaattatcgaagaaggcaatcatcaagaattactagcacaagaaggcttctacgcagaattgtataacaatcaatttgtatttgaataagagtgtgagttcagccggttatatcctgaggattagcagtggattgcgaatgagcgacgaagtcgatcatttgtgattcgtagctaaccggaaggatatggctgaaggaacacgtttcaagcctccaaaaaatcccggttcagccattttatattggctgaatcgggattttttgattatgcgtttaatgcattcggtaaggtgccaagtgcactgagcgttaagcggtgtgtcgctcttgaaatagcggtgtagaggcggttacgccccactgttggttcagtgtagtagtcattgattaagtcgtataacaagacgttatcaaattccaaacctttagcgagtgttaatggtaatgtgaaggccccactttcggggagggtggtcgtttctgtggataagtggtggacatcttttaattttaaaaggcgctcatcaaactgaccggcgggggtgataatcgctaatgtttggtcagtaggcagttgctcgatttgcgcttggatttgtgccaggtagtccgtatcattagtcgcactcagataagttggttgaacatcgtgcggttggaccgcgtgaacatcggttaagtcagggaatagctgactgaataacgcggtaatcgcaccggatgagcggtaactcgtccgcaatgcttaggtttttagattaggaaaaatcgcgggcagtttactgaattgaattttatggggtgtgagactttgatgttgatcaccgaagacggtgaattgcgccttggggaaaagctgtttaaaaaggtgtaatgagctagcgtgatagtcttgcacttcatcgatgaagacttgtttaacttttgggaaaacgcgctgcgttaaataaccgtaaacttgtgccgcaatcacggcatccacagttgattggcgcgcaataatttggtcaaaggctaaccactgataatcgtgcaattgttcagataaatcttggtaatcatagcggaccatttttaaagcgagcggtgctaatggttcgtcttcgcgaattaagcgtccgaaggtttgttgctgttcggtttccgttaagctttctaaacgtgttaaagtcgtgggggttttggcaattgtcattaattgttcctgtagataacttgtgagttgttgttgggtggcttgaatgcgtttgtccaatggtgcatccaccggcgtcttcaagaaaaattgataactagtggcggcgtcaattgtgaagggtaaaccgctatttaatgactggaagtcgcttacttgcaatgttagttggtcaattgctaggggtaaccggttgtgctgcaatcggaagatctgccaactcttctggcagcaactgcgctaatagttgttgcaaagtgaggttgaccagtgtttgttcaccaaaatctggtaaaacttgggcaatgtaatcctgaaaaagacggttaggtgaaatcatcaacacttcgttgagcgctagttccttacgttgtcgatagaggagataggcaattcgttgaaaaataacggacgttttaccgctgccggcaatgccatcgattagaaggtggtcagtcgtttgttggcgaataatcgtattttgttctttttgaattgtcgcggtaatggcactcatctgggttgttttagcttcttttaacgttgctaataatagtgggtcttcaatcgcgatttgggtatcaaagaaatcaattaattgatcagcttgaatttgaaattggcgtcgttgatttaaagttaccgggatttggcggccattagcttggtaactcgtggggccgaatgtctgttgataataaacatcagcgattggtgaacgccaatcaaaaataacaggttcgccatcttgattggtataactagctgaaccaagatagaagtcctcactgtcagtttcttccgggaaggttagtgtgattttggcaaagtagggttgttctaagaggcgtaacgtttcgtcttttctagcgagcaatgaatcagttttgaggttgagcatatcgatttctttattgatggtttctagagcggcaaaggtgtcgaggttatcagcatatgaatcaaaattgagtttagcttcaccggtaatctgggccttgatggtgttgccagcctgatgattctgcgattgggcatcgttgatggccgctaaagtggctgttagttgttgataaattgtggttaggtgggtttgttcttgttcaaaatcggttgtcatacaatcagccccttataaagttgtttacctagtgtagcaagtccaatatgaaaagaacagtcttgtaatcacatgaaaaagcgtgcataattaatatatggaagagtggtaattgctctaaaaacggtaaaaagaggtgctcccaaaattaactttgggagcacctcttttggtgtctctttgaaagggggcacgctagtcgaaacgtgccattgaagctagatttctgcgcttaacgacgattgtcaaactagcgattacatcgctaattcgccactctatgttaatgctcaaaatctgaccaagcttcaagagcactctagctaaaacgtgtcattgcaagtagatttctgcgctttgctacgtcccgcaaataatcgactgcgtcacttattcactggcctaggcaaatgctcaaaatctaaacacttgcaaaggcactctattctaagtagtccttctttaattgcgctatttcttctgatttgagggccattgcttgggctaagtagttgtccatattgccgtaatggtgttcgattgtttctctgacgagttcgagatgggcttttgaaacgctcttgccattcattgccgcgacttgggcgtcattgctgctgatgcgagtgggtgccgttgtggttaagcctaggacttcgtttgaaaggacgaaatcatctgaaatggttgcccagtctacgcctaatgcgctgaggatgagcattgtaccaatcccagttcgatctttgccagctgagcagtgataaaggaccgcaccgtcattgccatggttattcaataatacggtaaataggtcgcggtaagctgcttgtgcgtgagagtctgtgactaattgttcgtacattcggtccatgcttgaacgttcgggtgtagcaggttcttttttaccgaagagatgaaataatccctttttcgctggttttttaggggcgtctgcttgatcggtgaacggaaataccgaaagacggtgataggttaattggctgtcgtcaaatggatctggggcaaccttaatttcatgacgggaacggaagtcaacatcgtaagcaacgccgtaatttaggaggtcctcaatgtctgttgcggttagtgcgttaagactgcctgagcgcagtaatttatgccatttaacggtcttaccgtcaacggttggataaccacctagttcgcgaagattatagctacgtgttaaatttaaaacccgttgttgttcttgcatgccaatccatcctttgtaataagttacttctattgtataacgaagattgatgatatgcacctttattttgaatgttcggaaaccgtttaaagacaattgatcgtaaaataagtttttagtaagagcccattgacctttactgaaaaatctgctaatattttatcaaattttaaatcagttaatcatgatggttaatacgaacatttagttgattgatggccgattaagttcatgaatggaggaagattatgtctgcgtgggaatcaaaatttacaaaaaaagggtttacgttcgatgatgtcttattagtaccagcggaaagtcacgtattaccaaatgaggttgatctaggagttcaacttgctaagaatatcaagttgaacacaccaattatgagtgccagcatggataccgttacggaagcaccaatggcaatcgctatggcgcgtcaaggtggtttaggggttattcataagaatatgagtatcgaacgccaagcagatgaagtattgaaggttaaacgttcagaaaacggtgttattattgatccgttttatttaacagcggacaaacctgtcagtgctgctgaagatttgatgcgcacataccgcattagtggtgtcccaatcgtttcaaatctcgatgagcttaagttagtcgggattattacgaaccgtgatttacgcttcatctctgacttctctgttgaaatcggaacggtcatgactcacgaagcacttgtaacagcacctgtgggcacttctttagaagaagctgaacaaatcctccaacaaaacagaattgaaaaattacctttagttggtgatgatggtcgcttagcgggcttaatcacgattaaagatattgaaaaagttcaagaattccctaaggctgctaaggatcaatatggtcgcttattagttgctgctgctgtcggtgtcacaagtgatacttttgaccgtgcagaagccctattaaaagctggtgctgatgccattatcattgatacagcgcatggtcattcagctggtgttttacgtaaaattgccgaaatccgggctcgcttcccagaagcaaccttgattgcaggaaacgtcgcaacagctgaaggcacaaaagccttatatgatgctggtgtggatgttgttaaagttgggattggccctggttcaatctgtacaactcggattgtcgccggcgttggtgtcccacaattaacagccatttatgatgctgctagtgtcgcccgtgaatatggtaagacaattatcgctgatggtggcattaagtattcaggtgatattgttaaagctcttgcagccggtggtaatgccgttatgcttggtagcatgttagccggtactgacgaagcacctggcgaatttgaaatctatcaaggtcgtcgtttcaagacttatcgtgggatgggtagcttggctgccatgtcacacggttcatcagatcgttacttccaaagtggcgtgaatgaagcaaacaagttagtcccagaaggtatcgaaggtcgcgtagctgccaaaggcgcacttggcgatgttatctaccaattacttggtggtttacgttcagggatgggctatgttggtgctgctaacctccgtgatttacaggacaatgcacaatttgttcaaatctcaaacgctggtttaacagaatcacatccacatgatgttcaaattacaaaagaagcacctaattattcagcaagataaacctatgttaaaatgaaggcgctggggcaaatttaattttgtcgccggcgtcttttttatggatggatttaaagaattctttacccttaccaatccgattctttgttacaataatagcgaatcactcaaacgtgtttaaattaaatgaggtaattaatatgaaaattctaattgttgatgatgataaagaaattgttgaactactcagtatttatgtcaaaaatgaaggttatgaacccattcaagcttttaccggcaaggaagctttgactaaaattgccactaacccgggcattgatttaatgattttagatattatgatgcctaatatgagcgggattgaagttatcaaagcggttcgcaaggattcacaagtgccgattttggtggtttctgccaaaacaacggatatggacaaaatccaaggcctcatcacaggtgcggatgattatgtgtctaaaccattcaacccgcttgaagtgatggcacgtgtgaaatcattattacggcgcagccaacaacaggtgacaaacgaagtgccggatatcttagaagttgggccacttgtgattaagcgcgattcacatgaggtaacaacgattgcgggcaaacaaatccaattaacggcgcttgaattcgggattttatatcttttagcgagccatcctaaccgggtcttttcagcggatgatatttttgaacgggtttggaagcaagaaagtatcgtgtcagctaaaaccgtgatggtccatgttagtcatttacgggataaaatcgaagaagcaactgacggggaaaaagtgattgaaaccgtctggggtgtcggatataaggtcgaggtctaatgaacgaatatcaagtcggacaagattttaaaaaagtacaactcactgccaaagagaagagtgagctgtttgctgaggggatcattacggtgatccttttgttgttgttaaatttatcaattatggtcctattgcaacaagcaatcgttaataatccgcaattgcgcggtggcgtttggatgattaaaaatgcgattgcgattggccctaatggttggcatatctggagttggcaaaactggtttgtgattttgatgggaattgcggatgtgctagtggtttattggcgcttaattcgccgctatcaccaaatgcagatgtggcacgttattggtgaattacattacatcgctgatggtcatctagaacaccgcatcaacttgcgggttaatcgcgatttgcaacgcgtgattgatagtgtcaatacactggttgatagcacggtccgctcaatggaagaagaacgcaaaattgaaaagagtaaggatgaactgatcactaacgtcagtcatgatttacgcacaccattaacgtccattattggttacctaggtttaattgaagataatcagtatcaaaccaaggatgaattaaccaagtacacacatacggcctatgtgaaggcccaacaaatgaaggtcttagttgaagatttattcgaatacacaaaggttcggcaaacttcaacgccaattgctaaaacgacttttgatatggaacaaatgctggaacaactagcggctagctttgaattagaagcccagaagaaaaatatgcagattacagtagaatgccaacctgcaccattgatgatggaagctgacaccgaaaagttgggccgagttttcaataatttgattgccaatgcattgaagtatggcaaaggtggcaagcaaatcattttatcagccgaaaaggttggtcaagaggcaatcattaaagtctccaatgatgggcaacaaattccaagtgactcattaaatcaattgttcgatcgtttttatcgcgtggaagcatcacgttcacaagaaacgggcgggacggggctcggtttagcgatcacgcaaagtattgtagccttgcacggcggttatatttatgcagattccaccccagaactgactagttttgtgatacacttacctttaaaactaggacgtcagattgaacctcaaaatggcgccgctaaaaacagttaaggagtagcattgtgtttaaaagaatattacaggttttaatgactggccttttattagtgaccccagtggctgttgcgacaagtgcaacgcaacagggtgttcaagcggctacggccactagcgcaccgcaggttgacgctagcgccgcaattgcaatcgacccccaatcaggacaggtcttgtatgaaaagaatgctgaccaagtcttaccgattgcatcgatgactaagatgatcaccgcctatattgtcttagatcaaattaaacaaggtaagttgaagtgggagcaaaccactaaaccagacgctgccatttataagttgagccaggacaaggaattaacaaacgtcccacttcaagctgataaggcgtatagcgttcgtgaattatatcaagcgatgttgattgcttcagcaaatgatgcagcaatgatgctagccaatttagtggctggttcacaaaagaacttcgttgatttgatgcgccaaaaagtcagtcaatggggcattaaggatgctaagttatattccgtttcagggttgaataaccagtatttaacaggagagacgtatccaggtagtgccgctgatgcggaaaacgaaatgagtgcttcagaagtcgcaatcgtggcccaacacttattgaagactttcccagaagtgttagaaacaactaaacaaacggcctttacgtttggtcctaagacgatcgacgaaacgaagatggccacttggaacttaatgttaccaggccaaaataatgcgcccaaagattacgttgtcgacggtttgaagaccgggacaactgataaagctggcgattgttttaccgggacggctactaaagatggccaacggattttaaccgttgtaatgcacgctaatggtagtgacaaagggcgtcgttttattgaaaccaataaagtgatgcaatatgtttttgataactggcaacaaacgcaactcgtcaaaaaaggggcaaccatcaaaccttttgcaacggctgatgtgaagtatggtcggacgaagactgtcgcacttgaaacaccgcaagcaattgcaatgtgggttcctaaaggcacacaagttgctaatgttgattgggattatcaagtggttcaaggtggtcaaaaacgccaactaacggctcctgttaagaaggcggccgtcatcggtaaagtgacaccgaagattgcgggcgtgacaaaccgttacttagggacgacaccgcaatatacagtacaaaccaagacggctgatccaaaagctaatgtctttgtcttaataggtacgggtgttcgtgaatttttcactaatttattctaattaaatcagaggaatgcttaagcgagaatcgatcgtttaagcattctttttttagtgataataacgccgatttgtcagcattattcaatcggtttaggcttgaatatgctataattaaaccaattcataatgagtctaggaggacgaaaatggctttaacattggatgcatgtacattaattttaaaagagcattatttactcaaaagtgtagccctcaacggggattcaaacttgaatatgacagggattgcctatgattcacgtaaggtgacagcagataccctctttttctgtaaaggaaacttccgccccgtattcttaacgaacgctaaagaagcgggtgcggtcacttacgttgcagaacaaccaattgttgaaggcaatgggatgaacgcgttaatcgtgacgaatgtgcaaaaggcgatggctgtcttgtcagctgccttttacgattacccacaagacgacctcttcatcgtggcgtacacggggactaaggggaagacgactgcttcttactttacacaatcaatcttacaagaggctactaaccaaaaaacagcactcttttcaacaatcgatcgggtactggggcctaaacctgaggaccggtttaagtcagacttaacgacgcccgaaagtttggacttgttccacgatatgcgccaggctgttgaaaacggcatgacgcatttggtaatggaagtgtcatcacaagcctataagaaaaatcgggtttacggtttaacatttgatgttggcttcttcttgaacatttcaccagatcatgttggtcctaatgaacatcctaactttgaagattacttacactgtaaattgcaattactcgttaattcacggcactgtgtgattaacgcgcaaacacaaaacttcggtgatgtgtacgctgcagcgacaacgacaactgaaccagaaaatatctacttatttgcggacacgagttatcaaccagcacaaccggtggacattgatttccgctttgaaaatcaagccatgaccttagctgaaagtcgctttaaagtgacggccgtttctaaaaaagcgattcaattaggcgtttctggagattatcaattacggctgattggcgattttaacgaaagtaatgcgacggcggccattattggtgcagccttaggcggtgctgatttaatcgctgcccaacaaggtattcgtcgtttgcagattccaggccggatggaaaccctagcggttgaaggtcatggtcaagtttacgtggattacgcccacaattacgctagcatgaaggcactattgagcttccttcaaaaggaatacaatcaacctaagttactagtggttgttgggagtcctggcgataagggggtttcaagacgggctggttttgcgcaagtcttaaacgaatatgcagatcgcgcgattttaactaccgatgatccgggttatgaagatccagctgccattgcggcggaaattttagccggtatcgatcaagataaggttgccacgacggttgaaattgatcgtgcaacagcgattaaacaagctatcgaagaaagccaaccaggggacattgttgtattggctgctaaaggggcggatgcctatcagaaggtgcgtggtgtcgatacaccttacccaactgatatggtgattgccaaacaagtggcacaatacttaagctaaaaaaagaatgtggagggtttatgatgaaaaaatcagttgtaatgagtacggtgttagtttcaggattgttattattgagtgcttgcggtcaaaagcaagaagcaaagagctcatcttcatctgaatcaaaagtgacaagtgttaaaaagacaagtcattcaaagaaagcacaaagtcaatcgtcagaagaatctgtttcagaatcaacaagtgattctgaagtgacgagccaaagtagtcaaacaccaagtgcaactgattcgacatcagcaggcagtcaatccgcttcaacgcaaattagtcaagcaacaactagtcaaagtagtcaaacgagtcaatcgcagggcacacagagtcaaagtgcgcaacaatcaagcgcacagtcatcagctaatagccaatcatcagcaacgactaaccaaccacaaacaagtcaaccaacaactgtggatggcaatcaagcgattcgcttagtcatgcaacaagttggtcaaacacaagcgcatttatcttacttaaataacgggttgatcacacgtaatgcacaacaaggttatttaattaattgctacgcccctaacgaagattcacctcgggcaggctattttgtaacccaagacggtcaggttgaacaaatttggtaatcgactaataggagttgaggcagaaattattttgtcgcaattcctattttttgatgacgttcttttctgaaaaagattgacaaacgggcggactcctgtaaaataattcaagtaaagcgtaactattacgatttaaaaaggagaaagagatgaataaaaaacgattgggcatagtcgctcttttattaatggtcgcaatggtgattgccggttgtggtcagactaaacagaccaccaaaggcattcaggtggtctcgtcactagatttctacggtgaagctgcaaaagcggtcttaggcaagcacgggcaagtaacgtcaattattaacagccctagtttagatccccattcatacgaaccaacaactcaagatgctaagaaggttgcacaagccgatgttgtgattgaaaatggtctgggctatgaccagtggttatccaaggtggcagccagttcggattcagatcagcaaacaatgatcacggtcaataaactaatgaaacgaacagatggcgacaatgaacatttatggtatgatttagagaccatgccaacactcactaaacaattaatcacgcgttttagtaagattgatccagcacataaagctgattttcaaaataacggtcaagcttacttgaagaaattagcgggtttgaaaacacaattggcagggctcaaggcgcaagctaagggccaaaaagtggcggtcagtgaaccagtcttcgattatgcgttgaaagaaatgggttatcaagttgctaaccaacattttgctaaagctatcgaagacggtacggatccatcaccacaagatatcgacgctatgcgtcaactcattaaaaaacatcaaattgcctttttagttgttaacaagcaagaagaaagtcggacaattaaagagatgcaccaattagcaacgaaggaaaaagtgccagttgttcaggtgacagaaacactaccagctaaacaaacctatttaacttggatgcagcagcaatttgatgcagtaggaaaggctcaaaacgtaaaatgacagaattagtaagtgtcaaaaatttaggaatgaccttcagtaatcgtcaggttctaaaggatcttaattttaaaattgaacgtggtagcatgacgagtttgattggccctaacggtgttggcaaaacaaccctcgtgcgaatcttaatcggtagtttgcaaccgaccgccggcgagttgactttttcgccagacaagcaaagtttaaatattgggtacgtgccgcaatttcggaatttagaagcggaatatccgctctctattcggagctttgtcagccttaatcaattaaccaagcatctgccttggcatacgaagtcagagcgccaagcgttagataagattttggcccagacgcatttaacggcccttcaaaaaacaacggttggcaatgcttctggtggcgaaaaacaaaaggcgtacctcgcgcaagctttaatcagtgaaccggatctcttgattctagatgaatcaacagccagtttggatattgaaactaaagaagaagtgatggcgctagtggcagagctaaatcgtctgcatggcttaaccgtgatttttgtcactcatgatttagatttagcgcgtaagtatacggatcaatatttattcttaaagcgcggtcaatacgaaatggggccaatgagtcaattagaccctaacctagaattagattaaagcggaggacggttgagtgttaacttttgattttatgcggcatgcgtttgtcgccagtacgtttattgcaattacatgtggtttaatcggggtctttgttgtcgctagaaatatgtcgtttttagcgcatacgcttgccgagattggctttgcaggtgcttcatttggtgtcttcttaggcatcgcaccgctaaacgggatgttattgtttacgatgattagttcgattacaattggccagatgagtgccaaggaatcaagacgagaagcgtcgattagtgcgatttcaagtttgtttgtcggtctaggcattttattcttgtcgctatctaaccgcaatgcgagttacgcaacaaatatcttatttggttcaattatcgggatcagtttaacggatgtttaccagttaattacgttgtcagcagtcattgtggttggcatcttactcttttaccgctacttggtctttgattcatacgattcaattggcgcccaagcacaaggattaaaaaccaattggttatcgatttatttcctaatcctcttggctattagtgttagtatcgcggcccaaatcgtgggttcgttattagtctttatcctagtgaccttaccagcctttattgcaaaatatcttgcgaagagtgtaccggcgatgttggcagtttctgtcggagcggctttattaggcgtttggttaggtttgtggttagggtatattaccaattggccagtgaccttcttcatcgcaacgctagaattcatcttttactttattgcacttttatatcatcaacatgttagtcattaaaaaaagtctggccactggccagactttttttaatagttacatatcagcaagtaatgcttctaattgatcgaggcgttgttcaaaaacatcaaaagcgtgttcgagataatcggcgttagtcatatccacaccggctttttgcatcgtttcaattgggtaactggcactcccatttttgaggtaggcgagataattgtcgagtgcacccggttggttcgtactgatttgatcagcgagcgtcgtcgcagcggcaaaaccagttgcatattgataaacgtaatagttcatgtaaaaatggggaatccgagcccattctaaggcaatttgaggatctttggcgacggcatcgccatagtagtgagcgtttaagtcagcgtagtaagttgacatgaagtcagccgttagaggggttccattggctgctgcatcgtgaatatagtgttcgaattcggcaaattgtgtttgacggaagacagtccctttgaaaccatcaaggtagtagttcaacaagtaggcttgaactttgggatctttttgggtcttcaaaagatattcagtaagcaggttttcattcgttgttgacgcaatttcagcgacgaagattggataatcgccataaacgtaaggttgattgtgacgtgttaaataactgtggccactgtggccagtttcgtggaccagtgtgtataagttgttaagatcgtcttgccaattcaagagaatgaacggattggtatcgtaagcaccaccagagtaagcgccgctgcgcttgcctttgttttcaacgacatcaatttgccgttgatcgaagatttggtccacaattggggtgtattcaggccctaagacggctaatgcttcgcgcgctgttgtttgtgcttgtggataagtgtagctcaaagcgggtttgcctaaaagtggtgtgtataagtcgtacatatgcaattgcggtaatgctaattgcttttgacgtaatttaacataacgatgtaataatggcaaatgttggttcacttggtcgactaaggtcgtgtagactgattcaggaatggctttaggtgcgagggctgcttggcgcgcactgtcgtagtgatggacttgagcgaggtagttgtgccctttgatctcagtcgcaagggttgtcgcaaatgtatttttgaactgatcataagtgctgtagagtgcttcaaagacgtcttggcggacctggcgatcggttgattgtaacaattggctatagaggccgtttgataattgatgcgtttggccggtttcatcgacaacgtctgggaattgaatatctgagttatccaaaacactgaaggtttggctagcagcaccaaagatatcgccagcagcggcaattagggcttcttcttgacctgataagacatgttcgcggctatcagtgatagtctggataaaatgttgataacttttaagtgctggctcattggtctgccagtcagttaattggtcaacgggaatttcgaggatagcgggttctaaaaaggcggccgccgctgaaacgtcagctgctaaagcatcgacctgagcttgataaccttgataagtggtattagctgtatcttgatcgtttttcatgctagcgtaaacgtagaccgtttctaactgtctaaagagcgttagcacttgttcaatcgttgttacgagttgatcagccgttttaaacggttggttgtattgttcaagtgctggtagtgcctgtttgagcgttgcgacagctacttcgaaatctgagtcgcttttgaaaatggtactgaggtcccaggttaagttttcagggacttcagagcgtgtgggtaatttgtgaattgccataataaacctccgtaaaatatgaataattaaacatattctagcatagttcagagataattcagccacgaaacctttcaaaataaatattaaaattgtataacttttcttaaaaacgattgtttgctttgataattcggctataatgacaacatacataacattcgcgctagtacaacatagaagggaaccacttatgcagaattctaacttttttggctcaagagaagataaatacaaaaaaggcaaacgccatcgaaaactaaaaatattcctattaatcatcgtgattctcgtcttttcaggtggcgcgtatgcgatgcgggtcagtagccaattgaagtctgcagccgataaaatcaataaatcggaagccacttctaaagcgattaaaaataaaaaggccttttcaatcttattactaggtgttgataccggtgctgaagggcgaattgataaaggtaattcagatacaatgattgttgcaaccgtcaatcctaaaaaagaacaagttaagttagtcagtattccgcgggatactttagcggaactacaaggtacgaagtcttttgatatgcaaaaaattaacgcagcctataatgttggcggctctaaaatggctaaaaaaactgttgagaagatgtttgatgttcctatcgactattacgtaacgattaacatgggggccttatcgaaaatcgttgatgctgttggcggcgttgatgttaacgtcccattctcgttcaaatataatacaaccttcaaaaagggtaagatgcatctaaccgggaaagaagcgttagattattcacggatgcgttacgatgatccagaaggcgattatggccgtcaaaaacggcaacgccaagtcattacgtcgttgattaaatcagcagtttccttcaagtccctcaccaattatgaatcaatcttgaagacgctagaagatagcgtcgcaacggatctaagttttgatgacatggtggccattcaatctgattaccggacagcggcgaaatcaattacctctgattacctcaaggggcgtaatgcaacaatcgatggctcatcataccaagtgccaacaaccagtgaaattcaacgcgtgtcagatgttttacggacgtcacttgggttagagaaaacgaatattgataatgcggaaacaaaacaaaatgcattaaacacgaactttgcggcaacggaatatcaagatgaatttacgatttatccagaaagtgtcctaaaagatggcacgacaaccagtgaagccgccagcacaacaaccacccaagataatacgacccaatattcccaaagtgcaccacagtcaaactggcaacagccccaacaggagcagtctcagtggcaaagtagttactaagatggtttgataaaataacagtcaaaaacagcgtcatcaagtttacttgatgacgctgtttttgttataaccagtttacttttagtgccgataacggtattatttgtaatggtacaaaaagacaaacaaaggatgtggcggaacgtgtatttgcttgtaaatgtgatagggttattagtttttattggagtcggctttcttttttcaaagaaaaagaaggatatcgattggcgctcagttttaattatgttagtgattaaccttgtattagcttggttcttaacaagtttttcagttggtcgggacatcgttttaggtgctgccaacgggtttaattggctcgttcaagttgcttacacggggattgcattcgcattaccaagttgggtaaatgttaaacagatggatttcgtagccagtgtgttactccccatcctaatgattattccattatttgatatcttaacttatatcggtgtcttaccatggattatcaaatggttaggtcgtggtttagctaaaatcacgggacaacctaagttcgaatcatttttcgcagttgaaatgatgtttttagggaatacagaagcattagctgtttcaagcttacaattgaaacaaatgaaggcagaacggacattgacgcttgcgatgatgtcaatgagttgtgtgacggcttcaattatcggggcttacacacaaatgatgccaggacaatttatcttaaccgctattccggtcaatattattaacgctattattgtgaccaacattttaaatccggttaaagtgacaccagaagaagacacaatcgccaaaatgggtggtagtggttcagcagttggcgaagaagaagccgctgacggtaagattgaacgcgaaccattcttctcattcttaggtgattcaattttaaatgccggtaaattagttttaatcatcacagctaacgtcatcgcctttgttgctttggcagcgttgattgataaagtattacaattatttaacccttggattacccttgaacatcttctaggaatcgtgatgtttccatttgcctggttgatgggcttagatgtcagccatgcctttgaatttgcacaatatatgggcacgaagttagtaacgaacgaattcgttgtcatgggtaaagttcaaaattcaatcacaacttttgcaccacattatcaagcagttttaaccgtttttgtcacatcatttgccaacttctcaacagtcggcatgatcatcggcgccttcaagggcttagttgatcgtgaaaagaatgatatgattgctaaaaacgtcggctacatgctcttatctgggattttagtctcattactctctgccgcaacggttggtttattcgtttggtagaaaaaaataacaaaaaaactggatttggtagtgacaaattcagcataaaatagtattatagtagggtgctattgcgaagttgcaataacatcatactttattgggctatggccaagcggtaaggcaacaggttttgatcctgtcatgcgctggttcgaatccagctagcccaactcaagaatcgttgaagaagtgttaagtagataactatttaacactttttttgtacgctaaaaaagtagacgcccggacagaatcctgtataatgaggcaggaactaaaaaggacttaaaaggagtttggcatggctgatttagtttatcaaacaattattgcagatttaaaaaaggcaattaatgcgggtgcttatcccagcatgaaattacccgacgaaagaacgttgacggaacattatcaggttagtcgtagttcggtgaagcgggcgttaaacgttatggctaatcaaggtatcatttttaagaaacgcggttcaggcacctttattaatcctttatatttaaagagtggttcattttttaattacagcggctctaatctaggggttaccgatagctttaaggctggcgatcgaaaaccgggaattaagttattagatttccaagtcatcaagcccagtgcagaattgcaacgggacttatttttggaaccagatgattttgtatacgaaatcaagcgactccggttgtttgatgacgaaccgttcatgattgaaaccgggtttatccccattaagattatgccgggactgaccgaaaaaattatttccggttcaatttttaattatttagaaacggaaaaaaatcaagaagtgacgcgcgccttcttatcaatttttgcagaaccttctacgcaagatgatcaagatcagctgcaactaaagccaactgaacccgtgggcatcatggaaggcatcttctttttggatgatgggacaccatttgaattttcaacaatgcgacttcattatcagtacatgaaatacaatacttttgtttcagtcagcggtcgggaatagaccgttatttttatcttcttaaaattggtacgacccaatataataaatggttgacttttagtttttatctagtatgataagtatgtaagcagaaacataaaagttgcaaatcacgcaacttattcataaagtgaacctatcagaagcttttttaaaaaaaggagtgctattacgatgacagattattcaagtaaagaataccttgctaaagttgatgcattttggcgagcagctaactatatctcagtaggccaattatatttaaaagacaatccattattacaacgtcccttagaagcaaaagacgttaaagttaaaccaatcggacactggggcacaatctcaggacaaaacttcttatacgcacatttgaaccgtgccattaacaagtacgacttgaacatgttctacgttgaaggcccaggtcatggtggccaagtcatggtttcaaattcatacttagacggtagttatacagaaatctacccagaaatttctcaagatgttgatgggatgaagaaattattcaaacaattctcattcccaggcggtgttgcttctcatgctgctcctgaaacacctggttcaatccacgaaggtggcgaacttggttattcattatcacacggtgttggtgcaattttagacaacccagacgtcatcgcagctgttgttgttggtgatggggaagctgaaactggcccattggcagcatcatggttatcaagcacatttatcaatcctaaaaatgatggtgctgtcttaccaatcttgaacttaaatggtttcaagatttctaacccaacaatcctttcacgtaagagtgacgaagaattaacaaaatacttcgaaggtaacggttgggcaccaatctttgttgaaggcgacgatcctgaaaaaatgcacccagcaactgctgctgcaatggatgaagccatcgaaaaaatccaagcgattcaaaaagctgctcgcgaaaacggcgatacatcacgtccagtatggccaatgatcgtcttccgcgctcctaaaggctggactggtcctaagacatgggatggcgtaccaatcgaaaattcattccgtgcacatcaaattccagtgccaattgatagcactgacatgcaacatgccgatgcattagttgattggatgaagtcatatcgtccagaagaattatttacagctgaaggtcaattaaaacctgaaatcgctgcaatggcacctaagggcgacaaacgaatggctgctaacccaattacaaatggtgggattgatcctaaaccacttcgcttgccagattaccgtgactacgctgtggataacacagaacatggtaaagttgttgcgcaagacatgattgttttaggtgaatatgtccgcgatattattaaagacaatgatcaaaacaaaaacttcagaatctttggccctgacgaaacaatgtcaaaccgtttgaaccacatctttgatgtgacaaaccgtcaatggatggaaccaatcaaagaaccaaatgatcaattcatggcaacagaaggccgtgtccttgattcacaattatcagaacatcaagctgaaggctggttagaaggctatgtcttaacaggtcgtcacggcttcttcgcaagttacgaatcattcttgcgcgttgtggattcaatgttaacacaacacttcaagtggttaagaaaagcagacgaacaagcatggcgtaacaagtatccttcattgaacgtgattgcaacttcaactgttttccaacaagatcacaatggttacactcaccaagatccaggtgtcttaacgcacttagctgaaaagaaacctgaattcatccgtgaatacttaccagctgatgccaacacattattggcaacaatgaatactgtcttccaaagccaagaaaaaattaacttagtgattgcttcaaaacacccacgtcaacaatggttctcaattgatgaagcaactgtcttagttaaaaacggcttgaagattattgattgggcaagtacagatcaagatgctgaaccagacgttgtgattgcagctgctgggacagaaccaacacttgaaagtttggctgctatctcaatcttacacaaacaatatcctgacatgaagattcgtttcattaacgttgttgatctattgaaacttcgttcacctaaagtggatcctcgtggcttaacagatgaagaattcgatatgtactttacaaaagacaaaccagttgtcttcgctttccatggtttcgaaggcttagtgcgtgacatcttcttcgatcgtcacaaccataacctccatgttcatggctatcgtgaaaatggtgatatcacaacaccattcgacatgcgtgtcttgaaccaaatggatcgttacaacttatctaaagaagtcgcaattgacgtgcttggtgaccaagccggccaattcgcacaatcaatggatgatatggttgctaaacacaaccaatacattcgtgatgaaggtactgatttacctgaagttgaagaatggcaatggacaccactccgttaacagagtgagagtgcgtttgaaccggttatcttctgagcattaactggatttgacgaattgacgatgtaatcgtcgattcggtaaatttggttaagcgcaggaagatggttcaaaaagcacgtttaaactatagaattctgctatcagaagaagggtctgggacaaatcaattttgtcccagactctttttttatggattcctagtgactgagcctttatttttagggttaataacggtaaactagaagacaagtataattttagaaagaggcgtttttatttatggcaaagaacaaaatccgtgtacgatatgcaccaagtccaactgggcatttgcacattgggaatgctagaaccgcattatttaactacttatttgcacgtcacaataagggaactttcgttatccggatcgaagatacagatacgaaaagaaacattgcagacggtgaaaacagtcagttagataacttaaaatggttaggcatggattgggatgaaggtccagacaaacctggtaactatggtccttaccgccaatcagaacgtcgcgaaatctatacaccccttattcaagaattagttgaaaagggtcttgcttacgaatcatataaaacagaagatgaattaacggcagaacgtgaagcacaaaaggctgctggtgaagcacctcgttacgtttacgaatatgaaggtatgagcgatgatgaaattaaggccagccaagaagctgctagagcaaaaggcttgcaaccagttgttcgtcttcgtttacctaaggatcatgtttataagtttgatgacatcgttaaaggtgaaatcagctttgaatcagatcgtttaggtggcgactttgtcatcatgaaacgtgacggcatgccaacttataactttgccgttgtcgttgatgatcatttgatggaaatcacacacgtcttacgtggtgacgatcatatcgccaacacaccaaaacaattggccgtttacgaagcctttggctgggaaccaccaatttttggtcacatgacattaatcatcaatactgaaacaggtaagaaactaagtaaacgtgatgaatctgtgcttcaatttatcgaacaatatcgcgaattgggttacctaccagaagcaatgtttaactttattgctttattaggctggtcaccagttggcgaaagcgaattgtttaaccgtcaagaattcatcaaacaatttgatccaagacgtttgagcaaatcgcctgctagtttcgatcaaaagaaactcgaatgggtaaataaccaatacgttaaacaatcagaccctaacaagatcatggatctttcattggatagcttgattaaagcgggtaaaatcgccgcaaatcctgatagcaagactatcgaatgggcgcgtcatttgatcgcgttataccaagatcaaatgagttacacagctcaaatcgttgaaatgtcagatgtcttcttcgaagaacctgaacaattagatgccgaagcgcttgaagaattaaataacgaaacagcacctgttgttttgaaggaattcagcgaacgcttgaaagatttgacattattcacagcaccacggattatgcaaattgtcaaaggcatccaaaaagatacgaagatcaaaggtcgtctattgtacatgccaatccggattgcaacgacgcgcgaaatgcatggcccatcattaccagattcaatcgaattattaggtaaagaccgtgtcttagcacatcttgaaaaaacattagccgaaattaaataaagaagaagtgtcacggataactaatctgtgacactttttttgtatcagatattaagattttgcaagcactcagtgtaaccccttacatttagcggtatactagaaatcaaatagcgtcagtagggggatttaggatgaaagttttaacttttggtgaaatgttaatgcgtttgaagacgccggggaatcaacgtttattacaagcggatagttttgaagcctcatatggtggtgcagaagcgaacgtcgctgtttcgttggcacttttaggggatcaggtcgcttatttaacgaagctgccgaagaatctattagggcaaaagggcatgcaaactttgcgaggatacggtgttgatacgactaagattcaatatggtgatggccgcttaggcttatatttctttgaaaaaggtgccagtgttcgttcaactaatgttgtttatgatcgggcacatagtagttttgcgacaatggccgctagtgaatttgattggaaaacgatttttgaagacattgattatttctatttctcaggcattacacccgccatttcggctgaattggcgcaagcagccgagacagcttgccaatattgtcaagctcacgatattccagtagtttgtgatttaaactaccgcgggaagttatggtcaccagaacaggcgcaagcaacgattaaacgcttaatgccgtatgtcacgatctgtattgctcatgatgaagactttgaagcaacactcggaattcaagcctttgatggggatgagagtcacggtatcgcgcaaaaagaatcttttaaagcagcgatgcaacaagtccggcagattttccctaactgccaaatggttgccagcatcttacggaatattcggtccgttgaagatagcgagtggctagcattgttattaaaggatgaccaattctttgaaacgggcacttatcaaatgcacgttatggaaggggtcgctgccggagatgcctttggcgcgggcttaatgcacgggttattaaataactttacgcctgatgagatgttgcaattcggcttagcagctagtgtggccaaattgacgattgctggcgactttaatttaattggtgaagcagaaattgaagcaatcgcacaaagtggcggcggtgcccgcttatcacgataaataatggttagcgctatcaatgtaaccgttttaattgtataattaacttatacaattaggaggtactgattatgacaaaaaaagtagcgtttattacaggtgcagcacaaggaattggtaaagccatcgcgcaccgtctttcaaatgacggttttgcagttgccatcgctgatttcaatttagaaggtgcccaagcagttgcagctgaaattaacgaaacgggccgggctatcgcagttaaggttgacgtttctgatcgtgatcaagtatttgcagcagttgaaacaacggttgctgaactgggtgggttagatgttgttgtgaataacgcaggtgtcggcccaacaaccccaatcgaaaccattacaccagaacaatttgaaaaagtatatgcgattaatgttggtagtgtttactggggcattcaagcagccgttaaagccttcagagaccttggtcatggtggcaaaatcatcaatgcttcatcacaagctgggcaagtcggtaatccagaacttgctttatatggtggcactaaatttgcgattcgggggattacacaaactgcagcccgtgatttagctgatcaagggattacggttaatgcttattgtccagggatcgttaaaacaccaatgatgatggatatcgcacataaagttggtcaaaatgcgggcaaagatgatgaatggggcatgcaacaatttgccaaagacatcactttaggtcgcttatcagaaccagaagatgtggcagcctgtgttgcttatttggctggaccagattctaattatatgactggtcaagctttaattatcgatggcggcatggttttcaattaaaaatattaaaaagggcacgtacaagctaacttgtacgtgccctttttaggttagagttgaatgatttttaaaagtgcagccgatacttcttcacgcttatcttcagggagttgcgttaggtaatgcaccaactttaaggtttgagcacctgatagtgctggatcgccaaaaaagtcaattagctcaatccccaatgcttcggcaatatcgttgagtttcttaatttttaagttatcaacttcaccgcgttcaatccgagaaataaagctgtaagaactgccagatttctcggccagttcttcaatggttagccctagctgcttacggtgttcgcgaatcatctgactaattgtatctagcattcggtaagctcctatcatgattatctaactttaacgatagaggtttctttaaattgttaaaagagcgtaaaagctatctttttgtaaaaaaagtagcaataatgatttgttaacggtataatacaactattaattatcagattttaagcaggggactgtcaattttaagaactggtggttaaaaatgatattgggggatattaatgatgaaaaagagttacagtcttatcttaacggttgcggtggttagcttattgggcgcttgttcagctaaaggtgaacaaacaaccaaatcaactagtactagtaccagccattctaaaaaagtgacatcagtaaccagcagtcaaaagcaagtccgtaaagaaacgacttcgagtgtgtcgcggacaaaacagcaagcacaatcacagtcgcagaccaaacaagcaaaggcgttgtgggatagtagcaagaaacaagccttggcaacctttatgagtggttggggaacgacgatgggccaaacgtatcaatcttacgatttaacacgggatactgattatgctggtattcattttcctagtaagttagcccagaccgatttagcggtcgacgatacgccagtgacggcggcttggagtactgatggtaccggtagtgcggactataacgttgttgcaatctattgcgatgtcgatggcgggacagttgggggtcacttatacttatttacgttccataatgggcaaccagtggtcttgataaggggacaccagataaccggctccatttcagcgtcactgctaatacggatttgaagacgggctttgccaatattgttagtgggcaaggcagtggacaggcaaatacgagtcaaccgacgactagtgcggtgagtcctatttcggcagccgaagcacaagcgatagtggccgcgcaaaacatccaatacagagaagaacaaggagaacctgcggggaataaaacaagcttagcaggtggcggtattgttctaaagcaatacgctggcgcacaaggtatcgatattattaagctaactcctaaaccggggaacaaggttaacatcaccgttcaaaatggttctcttagagatggccaagccggtgagacggcacccatttcccaaaatatcacggttgatcgctaaaaaagaagaggtaccgacaatttcttgtcggtacctctttttgatagttctcgttttattgtcgggttcgatcgatttcggctctgatttccttaaagctttgttctgtttcttgaccattattgacggccaccatcatgaagaggctatcgataagactgatttgggcgattaaagcatgcagcgcttcggcccgataattagtttcttctgaaattgaaagtaaggtgatatcgccgagcttggcaagacttgaattaccgaaactggtgatgacaatcagtgggacttggcgctcttttagaatgcgggcgagttctaaagcgtccttattttgaccactgtgtgaaatgataatcgcgcaatcttgattagttagttttgtcgcttgcatgagttgtagatgataatcttggttgaagactgtggggatgctggttctgaggaatttgtggtaaccatcttgggccacaatcccggaagcccccaaaccaaataaactaagcagatgggcgcggttgattaaggcgaccgctttttgaagttgttcttcagttaatagcgaccaagtagcttttagcgcgttgctgttagaactgaagattttttcggccatcgttgtaaaagtatcgtttgcattgatttcatgaaaaagtggtgaggtgttggcttctttggccaggagtgccatcttgaaggcttgaaaattatcgaagcccaatattttagcgaaacgtgaaattgtcgcggtggagaccccacagttggcggcaaattcttgaatcgttaaacgctgattgaattgtgattcttggaagatgtagtcagcgatttgcttatatttttcgctaaaattatcataataagatcgtaataatgaatcgattgcttgcgccattgtcgggaccccctagtaatgattagccctagtatagcataaaaataaaaatacgaaaataattttctataaaacgcttgcattgtgaaaaaaatttacatataatgagtttgtaagataaaaggataagcagataggggacttaaaaatgaaattagcaatggtcggtttaggcaaaatgggtatcaacttagtagccaacttacgacggaacggtcacgaagttgtggcttttgatttaaatcaagcagcggttgaagaagccgttaacttaggtgccacagcggcaacggatttagacgatgttttagcacaattaacgagtcctcgaattgtgtgggtcatgttaccagctggtaaaccaacagatgccacgattcaaacattaagtgaaaaaatgaatgccggagatatggtgattgacggtggtaattcattctttgaagattcagaacgccataatgcacttttaaaagaacaagggattcatttcttcgacgctggtacttcaggcgggatgagtggtgccaacgctaacgggaacttcatgattggtggcgacagccccgaagccttcaagacaatcgaacccatctttaaatcaattgcccaagaagatggctacctttacacaggtaaagctgggagtggtcattacttgaagatggtccataacgggattgaatacgggatgatgcaatcaatcgcagaaggttttgatgtcttagaacacggccgtttcgaatatgacaacgaagcagttgccaaggtttggagtaacggttcagtaattcgcggttggctaatggaattagcacaatcagccttttctaaagatccagaattagaatctttaaaaggcattatgcattcttcaggtgaaggccaatggacattggatgaagccttgaaattacaagtaccaacgccagtaattgggttatcattgatgatgcgttatcgctcacttgaagatgatacctttacaggcaaagttgttgccgctttaagaaacgaatttggtggccacgctgtcgataagaaataattcggttttaaacaacaaacaaacgaggtaattaatgatgaaatatatgattggtgccgatattggaacaacaagtactaaagctgtcctatatgatttaaagggaaatgtgaaggcctacgctaatgttggctatccactataccaaaatgtacctgatatggcggaagaagatccagatgaaatcttcgaagctgttgtagaagtactgggaaaagtaatgcgcaaaggacatgtacaagctggcgaattacaaggtgttagtttctcagctgcaatgcatagtttaattttgatggatcgtaatcatcaaccgttgacacgggcgattacttgggcagataaccgcgctgctaaatatagtaacgaattaaaagccaatggattagggcacgagatttatcaacataccggaacgcctattcacccgatggcaccattatcaaaaatcatttggttgcgtcacgaacaaccagacctctttaaacaagcagcacaattcattgatattaaaacatatgttttccaaaaattattccatacttataagatggaatattcaatcgcttcagcaactggcttgtttaacatcttcaatctagattgggatcaacaagcccttgaagttgccggaattacccgtgaccaattaccagaattagttgaaccaactgcacaaattacaggtttagatacaacttacagccaagaaacgggaatcagtagtgatgttccatttatctttggtgcgagcgatggcgttttatctaacttaggggttaatgcaattgatcctggtgttttggcagtgacaattgggacgagtggtgcagttcgagtggtggttgataaaccagtcgttgatccaaatggtcgattattctgttacgctttaactaaggacaagtgggttgtcggtggacctgttaacaacggtgggattgtcttccgttgggttcgtgaccaactctttgcgcctgaaaaattaacggccgaacagatgcaagtgtcaacctatgatctcttgacgcaaattgctgaaaagattccagccggttcagatggattattattccacccatacttgggcggtgaacgagcaccaatttgggattctgatgcacgtggttcattctttggcttaacacgtcaacatacacgggctcacatggtacgtgcagcactagaagggattgtttataatctctacatggtgatgttaatgatcgaaggggttgctggcaaacctaagagtattcaagcaactggtggttttgcccgctcagaattatggcgtcaaatgttagctgatatcttcgaacaagatgtgacaattccagaaagttttgaaagttcatgtttaggcgccgcagttttagggatgtattcattaggtttagtggatgatctctcagctgttaaagacatgattggtgtgacaaatgttcacgaaccaaaagcagaaaacttcgatgtttaccgcgaactaattccaatttggattcgcctcactcgggaattgagtccagaatacagtgcaattgctgatttccaacgcagacatatgcaagttaaagaagcaactaaggattaaagattaaacgttcaatcaccaaaagtgggattgagcgtttaatttattagttcaatgtaaacgcaaacaaaatagaaagtgggaatggttatggaactcttagtcttattattaggcatcatgttattattactactcattattaagttcaaactgaacacgtttgtttcgttagtgttaacagcaatggttgtgggtgtcggtttagggatgccactgactaaaattgcaactagtgttcaaaatgggattggcggacaattaggtgaattatcaatcgtctttgggtttggtgccatgatgggccggctcgtcgctgatgctggtggggcgtttagaatcgcccacacattaattgataaatttggtaagaaacgactccaaatcgcgattatgttggcgtcatttattatcgggattgccttattcttcgaagttgggatggtcctattagtcccaatcgtctttgcgattgccgttgaagcgagcgtaccgattttatacttggggattccaatggctgccgctttatctgtgactcatggtttcttaccaccacatccagcaccaactgcgattacatctgctttaggtgctaatgcgggacatgttttattgtacggtgtcattattgcgattccatctgtgattattgcaggcccactttttacaaaagtggcgcggaaaatgattccagacgcctttgcacgtcaagggaacttgacggcacttggtcctcagaaaacgtttaaattagaagaaacacctagtttcggtattagtgttgtgacctcattattcccagtaatcttaatggcgatcacaacggtttaccaaatgttattcaacggtggttcactaccaaagaacccaaccttattagattcaatcattggttttatcggcacaccagcgattgcaatgaccatttcattgctattagcgatgtacacaatgggctggggtcgtcgtattaagacaccagcaatcatgaaaacaattgaagaagcggttaaatcaatcgctatgttactcttagtaattggtgggggcggggccttcaaacaaatcttaatcgatggcggtgttggcgatagcgtgacaacattattcgcgcatgcgagcttatcaccacttgtcttaggttggttaatcgccgttgtcttgcggatcgcgcttggctcagcaaccgttgcttcattaacagcagccggtttagtattaccattgatgcaatcagcaggcgtgaaccctgctttgatggtgctttcaatcggtgctggtagtttagcagcatcacacgttaatgatgctggtttctggatgtttaaggaatacttcgacttaagcgttaaggaaacattggcaacgtggaccgtcttagaaacattaatttcaattgtcggtttagttggcgtcttactattgagtttagttgtctaaaaaagttattattcaaaagagttgcggcaaaattcattttagcccagctcttttttttacgattaagcggtagcgcttgcaacgagtggcacgctcccctatagttaaggagaagtaaactcaggagggttattgtatgattgaaaaaagagtactctcagcaactgatgaaccagcattttacaacctcgcccaatacgcctttaataaaccggatagtgagcaacggcggttattcttccaaaaactgtatcagaacagtgtcggttttggcgtttttgatcagggtcatttgaagagtagtttattagcgacgccgtttaatgttaatttcaagggacaaacatttaagatgagtggtattggttatgttgccagttacccagaattttcgggccaaggtggcatctctgatttaatgcacttagcttttgagcggatgcaagcagatggcgtcacgttatcttatttagcgcctttttcgtatcctttttatcggcggtttggttatgaacaagctttcgagcaaacttgttatcagattaaaacggcggacttgccgcgtcttaaatttgcgccggatcaagggcacgttgaacgattatcgttaagcgccgctgtgccattaatcagtgtcttccaacagcaacatccgcataaccaggttggcggtatccaacgggccgcgtggtggtggcagtataattgtttgaagcatattgattgggaagtagccgtttatactgacggcgaccaaaaagtagcaggctatgtgatttatagccgtcaggcgacaactttagagattcaagagttattgacatcaacggttgccagtcaggaacaactggttaagttcatttttaaacatcaatcggcctatcaaaccattcgctacgagagtggtttgacaactaacttgggtgatttattaccggatccgacaattgttgaaacaacaacgataccctatatgatggcgcggattgtgtcgttggctgatttcttagcacgttatccgtatgaagtagcagaccttgaggcagtgaagattgctgttagtgatgactttttacccgagaatagtggtgtttggcaattaagtttacacgcgggccaaccgacggtaacgaaattggcgagccaaacggcggatatcacggtaattattcaacagctcaccaaggcgatgatgggctatcgcacactggcatcgcaagcgcattacggtcaggtcagtggtgatgcggctaaaatcgctcagttaagcgcggccttcaatcagacgcaaccgatgttgtgggactatttttaacacaaataaaaagagcaccaagactaatgtcttggtgctctttgtgattagattaagaagtagccaaatgttcctaagatgattaagaacaagaagttcataccagtaaagacgactaagaatttaccaatatctttaccccagccttttttgaaacgtttgtaagcaattaagttagcaagtgaggcgaacattgtgccgaccccaccgatgttgatggctaagaacattgcgtgactgtggttggtaaagcttgatagtaaaatttcagttgggacattagcgattaattgacaactaatgaggcctgtaagataggtttgtttagcagtaccaacaagtgaacgcatgaaagttgcgattgttgggatgtggcttaagttaccaactgcgatgaagaagcagaagaaagttaacaataaaccataatcgactgttttgaaaagcttcggatcaaatactaaaatcgcaatgatgaccaagataggtgtgacccataatggaatcaatgagaagactgctaagaaaacaaccactgtgagggggacgaaataccataaaggccctttttcaacttcaactggatggagaccatggagtttgatgggttcctttggaaaaagaaacgttgtggcggtcaacataatgatactaacaattaagaccgggattgaatattcaaagaaatggcgaatcgtcatatggtagaacgatacgaggaaaatattgtgcgggctcccaaatggtgtgagggatgaaccgagattagccgaaatcgtgattaacgtgacaggtaaaatcggtgaaaaatcaagttgccgcgcaattaggatgaacaacggtacaaaagttaagaccgtcatatcattggttagaaacattgccccaacaaaggtcaatgccaagagcatctgcattaaagcacgtttggaatgactcttaataatcagttcccgtgcgaagtaatcgagcacatgtagtcgttgataaacttggacgagtgtcataatacaaaagacactgacgatcacgtgaaaattaacgtaactaagatgggggcgattgaaaaatgaggtgacaatagctgcaatcgttgcggcgagaagtaatttgtcatctaagaaaaaatctcggatgttcaaagcaatgtttttcatatcgtttaagttatcctctttatattaagattaaaaaagcactattccaattctagactgtttttggcgataaaaacagaaaaatttacaatatatacataatttttacaatagctagaatcccattttactaaaggcggatgactatttaagcaatttttaagtcatttaactgctaaagtgctgcgtaattcagtataatagtaatagaaggaagcggttaatttttgattgcttcttgagcgcaactccgctatattaggattattattgattatttaagaagaaggtggcgcacatgaaagatgccccaagacatacagtcatattaggaatcgtcgctgcagtaatttcaatcatctgtggcatgttaattttgtatagtattttacacgtcggtttgtggctttcgattttagtcagtgtcattatcggtctttatctaggttataacactttttatagtacctatttagccgaaatgattaaaattgaagttatcaatcaaggtttagacagtaatgacttagctgaattgatgaacgggaatgccaaggactatcccattattcgtggtgatttacgtttgattattccacgacgtaaacgcgcggaattattggctaagctacgcgatcgggtaggctaagcggttttgcttccgcattagaactgtgttaacattaacctaacttattgaaaaggtgtcgagaacaatgacaattgaacgaccattaattatgaagctttgctctacacatttgaagatgacacagcgtgtagagcctaatattgattaaaagtcatctatagaagaatgctcacggtaatatgcgactttagggttgcttattttgtggtgtcttttatagatgacgggcgataaagtcagtgattgtaatcgcgacaggggtagctagatgctatccctgttttttattggaaagaaagtaggaaaagacaatgagtattttaaaagtcgaaggactaagtcaacaatttttagacaaacaactttatgatgacgccgggttccaagtcaataaaggcgaacacatggggattaccggtcaaaatggggtcggtaaaagtaccttgattaacattttaacaggcgctattttaccagatgagggtaaagtaacctggcaaaagaacatcaagattggttatttggatcaatacgccaaattagcgccgggtttatccatttttgaattcctaaaaacagcttttgcagatttgtatgctcaggaagaacggatgagtcaatattacgccgactatgcaacgagtttagatgaccaactacttgaaaaagcgggtgcgattcaagagttactagaagccaagaacttctatgaaattgatacgcgggttatgcaagttgcaactggtttggggattgatgcgctggggatggaccatgacgtttcacaacttagtgggggccagcggtcgaagattattttagcgaagttactattagaagaaccggatatgttgttattggatgaaccaaccaattatttggataccaatcatatcgattggctcagtgattatttgaataacttcgaaggggccttcattacaatctcccatgattatgatttcttggaacgggtaacaacctgtattgccgatatcgaatttgggaagattaccaaatataccggaacgctccaacaggccttccgccaaaaagccgataaccaagctagctatatgaaggcttatgagaatcaacaaaagaaaattgaaaagacaaaggcttatatccgtaagtataaagcgggttcacggtcaacaattgccaagagtcgtgaaaagcaattagctcatatggatattttgacacccccaagtaatcgcgtgaaggctaacttccgtttctcataccacgcaacagccagtcagattctattgacgaccaatgatctagagattggttacgaaaatgcgctattgccagccttaaacttctcaattggtcgggatcaaaaagtggtgctcaaagggtttaatgggattggtaagtcgacattgattaaaaccatcattaaagaaattccagcaattagcggtgattttgaaattgctagcacggtgaagtttggttacttcaagcaggacttaaagtggcctaacaacatggcaaccccactccaatatttacagggcgaatatccagaacaaaagcaaaaggaacttcgccaagtattatcccggacaggactaactgctgaagaagcgatgaagccgttgaaacaactcagcggtggcgagcaatcaaaggttaaaattgccgaattgctcctaacctcaagtaacttccttctattagatgaaccaacgaaccatttagacgatgatacgaagaacgcattgcgcaaagccatccaagaatttgagggcggcgtcttgctagtgacccatgaagaggacttttaccaaggcgattggatcgataaagtgttagatgttgagtccttgattaaatcttgatgatttatttttaatatatactgtatctataacagacaagtgttaagcttatggggataaatgactaacttaactaatattggcggaggtcatatggataaaattgatgtaacaaaattaacccagatgtcgaactttgaagtcgcagcactcttttataaatatgcactgacaaacagtcgcgggttacgggcgattaatgtcgggcgcggcaatccgaattggattaatacacaagcaagatttgcctttaatcggattgttgaatttgggatgaaagaatccttacaaacaattaacttagacgatggcaatcttgctggctacaccgatcaaacaggtatcgcggaacgcttcaatcagttcttagatggtgataatccggtggatgcttttttgaagcaggccttggcttatacccgagacgtcatacatatcaatcaagatgaacttgtctttgaatgggtcgatggcgttattggcaaccattatccagaaccatcacgcagcttagtgaatgttgaaaagattctaaaccggtatctagaagtaaatctctatcgcggtgaacatctatcagacaagacgaaggtctttccaactgaaggtgggacagctgcgatggtctatctttttaatgaactaaaggtcagccatattttagaggcgggtgatacgattgcgattaatacgccaatctttacaccgtacttgcagattccagaactaaatgaatttaaactacaagagtttaacgttagttctgatgaatctgatgactggcaattggtcgatcataaatttgaagagttgaaggatccaaatgttaaagcctttttcgtggtgaacccaaccaacccaacttctagagcttttagtgaccatgcactagataagttgaaagaagtcgttgaagccaatccgaacctcgtgattattacggatgatgtttatggcacgtttgtcgatgattttaagactatctattcagttgtgccacataatacattgttagtgtactcattctctaaattatatggggcaactggtcaacggattggtttaatcgcgatgcatgacgataatattttcgataagttgattgaagaaatgacagcagaagatcctgttattagagaagctttccgaaaacgatattcgtacgttacaaataaaccgcacgaaatgagttttatcgatcgaacggtagcggatagtcgaaacattgggttataccatgcagccgggttatcaacaccgcaacaaattaccatggcactctttagtttgacgaatctgatttatgaagggcaagaagatccgtatgtgacagcatccaagaaaattgttagctgccgttacaaggctttttgggaatcgttagggttagtcgttaagacaagtgaggaaaatgcagaatactatactgtttttagtatctataaattagcggaatcgaaatattctaaagattttagagcatatctcgaacaaaactgtaatcatcttgaatttgaatggcgcctcgcagcggaatatggggttgttgtaatggatggtgctgggatgggaaccaaggcggggtacttaagaatctcgcttgctaaccgtccagataaggactatgaaacagtcggcggtcggatttctgacttactcgcaagctactatactaaatacttgcaatctaaagcacggtaagttgtaatgaagggcgttagaacaatgataagttgttctaacgccctttttgtgtcccgttcagtagaattttatatagaaggtattagttggatttaatgcttataggaataaattaatcatttaatcaattttttagtaataagtgcttgacctagccgtattaagttggtaagatataaaagttgtcaaaagcgagtcactcagtaatgagtaaggaaataaataattaaaatgtttttgaaaaacacttgttatttatttctaatcgtgataacatgttatatgttgcttacggagctataacttctaagtgataaataatttttagaagtgtttgacagacgattagttatatgatataattaaaatgctgtttcaacacagtagatctttgaaaactgaacaaagttttgataaaccaaatgtgattataatgtttaattgtattagataagggcataatggagttgcggtaataaaaggattcaaattaatataaaattaattctagctcatcagtcattttaaatgatagttagtttggactggaggtgctacttagatgaatacgaacagtatttatttgacgctagctgagaaagaaaagtacgcattattcttggatattactaacgttaagtgggatgaactgcccgttaagaaacgaattagtatggccagacaggttgattacctgattgatgatgtgaatttaaaacaggttgcggcgctcttagatcgcaactacggtagtttatataatatgtacatgagcatggtgggcgatctgcaggcggtcttagggaccgatactgatgatgctcgtcagctctttaaggtaccgagtgatgcctatcatttttatatggttaaaaattcggatgtttatgattttgtccaaattttattacatggtggtaacgtgtcgttccaatcattttgggagaagcacaagagtagtaaggcaaccgtcttgcggcacttgaaacaggtacgggatttaattcgagcctttaatgtacggattgcgtatgatccaattcacttagaaggtgatgaaaaggcgattcggattgcgctggtgaccttatattggcttgcggctggtggacatacatgggtttttgatgacgttgaccaacaaatggcgcatgatgcgtttgattgtgcagttaaggcctatcaactagaagaacctaacttattaacgcgtgaaattggcacctatatgatcgcgatttcttattatagagtgatgcaagggaagattattgaagaagacgatcggatgtcgttgattcgttatccgtatcctgatttgactaatacttatctggttgctgattttacggaagattcaattaatttacgggcaacattggcgcaattatcacctgcacagtgtcgtgctgagtcggccgggttgtattttgtaatgaaatatggaccgatgccgctaaaatcgaaagaacagtttgatattactgaatgtatggtttatgaacgttatgtaccagaagtttatcattttgttcgtcattttttggaacggacgccaattgatattcagcgctatttgaagatatcggataaagtctatcacgagttacaaaatgccttatttgtggtcacaactaatattcatgtgttaggtaatgatatgacttccgtagcatcacatcaattaatggaacgcttaaaattattgcggcccaatgaacgattacgggctggcgttagtcagacagtcgattatctcttatctgaaccagaatttcgattatttgaatctaatcgagatgcacttgtgaaagcgtactataacttgatgcgacaattaattcaacagtatcgtccggctaaccgtgtgaaggttgctttagtggttgaacaagattatttaggttatatggatgtcttggcggcattggataacattcaatacgttgatgtcagcactagtgatgaagccttacgggatgccgatttagtggttactacggccagcatcatcttaccagattatacaaacccagaagcagtgccgtttgtttggcggttgaatgctaatagtgatcattacgctcgtttatacgggattgttcacgaattatggattcaaaaatcacacttagaaaaatctgagctcaattgataacgtacacatttgtatgcaaaaaaggcctggataataacttatccaggccttttttaaatcagatttagattgcttttgattgttgttcgtttaattctttaacccgttggtcgatcatatcgatgacttttttacgatcagcttcgttttcaacgaagtctaatacgtcgccgtcgatttgcatcttaggactttcatcataagcgtcgtaccaagcgtcataacggctgtttaattccttgtaatagtcgtagagggttggatcggcttctaattgttcataagaacgaccacgtttttgaatccgtgagagcattgtttcgaaactaacgcggacatggattaataaatcaggacgtttcttgtgggcggcaaatggtaattcttgcatcatgttggctaacaattcgtcgtaaacgcgcacttcagttgctgtggcacgaccgagatcagcgttcaagtggaagagtaatgaatcttcgaagattgagcgatccaagatgttgttatcatctgtgtaagcttgcttgatactatcaaatcgtttatttaagaaatagatttggagtaaaaaagcgtattttgtaggatctttataaaataaaggtaatacttcgttatcatcgacggattcgtaaaaagcttccgttcctaaatgatcagataaatattttgttaaactagtttttcctgcaccaattgtgccagcaagtacgagcaatgtcatcagtctccctcttttgactataaaatgtgttttgaatgttattgatatacaacatgtggtgtttcatcaccaaacgtcacttaaatattctagcatttttagcgcaaaaagcaacgcttgtttatcaaggggaggtgtggtttcattgcgaagtcattaatggtaaaataaattgcccattatagatactttccgggaggttagtcagttgaatagaaatgacagtgtttttttaacacaggctgaaaatgataaatacagtctgttgttggatatcgcgagcttgaagcgggatgaattacccgtcaaaaaaagaattgcattatctcgaaaaaatgaaccattagtcgacgacgttaatttaaaacaggtcgccgccttattaaaccggacttatggtagtctatataatacctatatgagtatcgtcgctgatttaaaagaagttatcggtgaagacactgaagatattcaaagattatttagtgtcccactagatgcctatcactatcatttagtgaatcaatcagatgtttttgattttgtaaacatcttgttgaaaggtgaagaagtgacgttcgaagaattttggacatcacacgatatcagcaaagcaaccgcattgcggcatttgaaaggtgttcgggatttaatccggtcatttgatattcgcatgtattacgatccaattcgcctagaaggtgatgagaataagattcggttagtcctaacaatcttattatggttatcgactgatggccatacgtggccttttaaagagattgatcgcctggatgccttaaaagcgttcgatttagcggtcgaccggttccaattggcaagccctaacgttttaacccgtgaattgggtgcctacttggttgttacaatgtactatcgaattgtgcaaggccactatattcaaggccctacggaagaaaatttattgcggtatccggtcccaaacatgattaaaacctatattaaccagccattcatggggccagcggtaatgattaaaaatgcaatggcccagatgacgatagaagaggcgatggccgaatcctttaatttttatgatttgatgaatttcgggcccattttattgcaaggaaataaccgttatatgccatcttatgatgatcgatatgaacgctacattcctaagacctatcaatttgtgatggatttcatggctaaagtaccggttgatcttgaacaccatctgaatctagaggatgaagattatcaaggtttagtgcagacgttgatggcaaccgtgatgaccatctatatgtttaaacaagatgtgatgtcgattatggccaaccatttgatggatgactatacccgcttaagggaaaatccgattttaaaacaagatattgaagacacaattgattacctattgatgaataagcagttaggttttatcagtgatttgcgtgatgagattgttagcggtttgtataatgtcttgcggcaggttgtccaacggatggccccaacgattcttgtcaaagtcgttgttgtatcagaacaatcatttttagggtatttcgatttaatgatgtcccttaaaaatattcgttatgtaaaagctagtcacgatgacgctgatttagcggatgcagatatggtcatcagtacatcaagtatctcattggccaataaggttaacccagatgctgtgatgtttaagtggaatcaaaatgcggatagcgatcactacggtcgcctatatgggttattaagagaactttggttacaaaagtcatcggattgtgattgaatttaattgccaaataggttattcttaatgcaagagataaacacgtgaataagcgcctatatggattgacagagagataccggttggtggaaggtattgaatccagtattccagcgtaatagtgggtagtgaataactacacggcacctgaccgttatcagcaatgaagggcactggttatttggtaatcagtgaacttgggtggtaccgcgaatgtgaagtcttttcgtcccaatctaggggatgagaaggctttttttgttgattattatctataaaaaggagagagtgctatgttagatatcagagtaattcgggaaaatgtccaatgggcaaaggataaattagcgactcgcggcattgatgctgcagaaatcgacgaggtagttgccttagatgaaaaacgccgcgctttaatcgtccgcacagaagaattgaagaaaaatagaaacgctgcttcagaagcaatcgctgttgctaaacgtaataaggaagatgcaactgaacaaatcgctgctatgaagaacgtcggtgcagaaattaaagaattagatgcacaattagctgaagtgaaggaaaaagttgactatatcttggttcgcttacctaacttccctgatgactcagcaccagttggtttggatgaaagcttcagccgtgaagaacgtaaatggtcaacaccacgtgaatttgatttcgaaccattagcacactgggatatcggtgaaaaacttggtattttagatttcgaacgtgctgctaaagtttcaggcagccgtttcgtttattacaagggtgctggtgcacgtcttgaacgggctgtttataactttatgttggatcaacatgccaaagaaggttatgaagaaatgattacgccatacttggttaatggcgaatcaatgtttgggaccggccaatttcctaagtttacggaagatgtttacacaatgactaacgaaggcgaaccaatgaccttgattccaactgccgaagtgccattgacaaacttctaccgtgatgaaatcttagatggtgcacaattgccaatctacttcacagccttatcaccagccttccgttcagaagctgggagtgccggccgtgatacgcgtggtttaatccggatgcaccaatttaacaaagttgaaatggtgaaattcacaaaacctgaagaatcattcaacgaattagaaaaaatgaccgccgatgctgaaaatatcttaaaagcattgaacttgccataccacgttatcacattggcaactggcgatgccagcttcacatcagctaagacttatgatattgaagtttggttacccgctcaaaatacgtaccgcgaaatctcaagctgttcagattgtacagacttccaagcacgccgcgcccaaattcgttaccgtgacgaagatgggcacgtcaacttggtccacacattgaacggttcaggcctagcagttggccggacagttgcagctattttggaaaactatcaaaatgaagacggtactgttacaatcccagaaccattagtaccatacatgggcggtatgacaaaaattggctagagtgtgaacccaaccgggtatatcctgaggattagcacggaatggcgaataattacgtcagtaattgtttgacgttcagatctaagcgcaggcatcagctttaaaaaaagcatttaatatacacggaaaacgcctaacaatcggtttattgttaggcgttttttaattaaatttagttaatctttaccgtttgaagggttcacacccgtataatggggactattagttaaggaggaatacaatgcaaattgaaattaataatcttgtggtaacgtataaaaataatgttgcactggatttaaaaaacttaaccattccagatggcggtgcttacggcattgttggtcataatggcgctggtaaaacgacgttatttaagagcttaaccaatatcattacgaattattcgggtgaaattcaaattgatggtcaaaacgtccgcgataatccagctattttaaaccgggtggggattgtcttagacggcatgtcagtttacatgaatcaaactggttggtttaatttggcttattttagtggcttacgtggtgaattcaaccgtgaacaagcgcgcacattagctgctgaaatcggcattgaagcggtcttggatcaaaaagttaaaacttattcttacgggatgaagaagaaattaatcttattaatcgcgttattgcatcaacctgaactgcttattttagatgaaccttttagaggcctagatttagagacagtacaatggttcaagaactatctccaaaaattgatcagcgaagggtcaatgaccttactcatctcaagccatgttcaaagtgatattgaaatgttctgtaaatcagtatttgtgattgatcacggtcaattgcgtgaaaccattgatttagcgaccgaaagtgacaagaaactacgggtggtcaacacgactgataatgcaaaagttcaagcgattttaaccgaaatggcttatgaacatgaagtgttagccgacggtcggattcaattatcgattaaagatcctaagtggcgagaagtccaaatgaaattaattgatgctgaaattgagatcaatgaaattggcgtactaagtgcattggacaataaattaaactaaggaagtgattagatgacgatccaacgaattgtaaaaatggaattcttcaaatttttccatgaaaaagtatatatgttaatttttgggattattgcggtcctcaatattatttttgccttgatattggcaaacgcacaatcactaccagctgagttatatggcaataaaacctttggctcatttatgattattagtattatgctgttaatagctgctaatttcatcttattatactggtatccgttccacgttttatcggtcgactataataacgatgttttggccctgatgatggcttctgggattaaacggaaacatttattctacgccaaattgattgtgacgatttgcttatcgatgttagccgcagttatccttttattagtaccagggaccttgctagtcattgaattgaataagaatatcgagatgctgcaactcgtcttctcgtcattcatgaataatttctcttggtattatttgattgatcttattctagcctatatcacaacggtgacattgatgttgttggcctgcacttggatgcgaggggcaaaaaaagccattttggttttcatcggtcttacttggggttatcggatcataacgtcatttgcattgcttgtaattccaacgattgatgtaaacgaaatgggccattatctagcgatttacggcattcaaatcatcgcgatgattctctttggatatatcacacaaagaattatggctaagcaaaatttatagaagaacccatattataggaagtaattagtgtgctaaagcgttctaggataacctggaacgctttttttgtgactaatgtttgattgattaatgcataagggttgaaattttcatgaaaaaaggttaaactagttcagttatcgtggatattgaatgtaattgattatacatcaaaattaagtaaggagttttacagatgaagatgattcaaaatgaatttaagttcattgccaagaataaaatcatcatgatttcgttaatcgtaatcatgtttattccgttcttgtacagtgtctttttcctgaaatctgtctgggatccttacggtagtactggtgaattaccagtcgctgtcgtaaataatgatcaaccagcaacttataacggtgaaacgttgagtgctggtaaagacatggttaaggaattaaagaagaacgaccaattaggttggcgtttcgtttcggccaagaaggctaaacaaggtttgaaggataaagaatactatacagtcgttactttacctaagaacttttcagcaaacgccgcaacagtcttggataagaatcctaaaaagatgcaaatccaatatgaaacaaacgattcattgaacttcatcggtgaagttatcagtgaaatgggtgccaaggaattgaacgcccaagtacgtgaaacagtaacaaaggcttatgctcaagttatgttcaaacaagttaaaacagctggtaaaggcttcagcacagccgcttcaggggctaagaagttaacaaagggttcagtcacactttcagatggcttgaacacttatacagctggtgttgataaggtcaacgatggcgtcatgacaatgaaaactagcgtgacacctttatcagacggtattcaaaaattagcagccggttcaggggccttaaacacaggtctacaaacattgaacagcaaaacaggcgcattagcctcaggtgctagccaattgaacagcggtgccaaccaattgaacacaggtctacaaacattgaacagtaagacaggcgcattagcttcaggcgccagtcaattgaatagtggggccggccaattaaacacaggcttacaaacgttaaatagtaaaacaggtgatttatcagatggtacagatcaattaaatgatggtgcacaacaattaagtcaaggtgtttctgattatacgcagggcgctaatgaaattaatggttatttaggtcaattatctgataagggtactcagttaagttcggcaacaagtaaacttccagcaggtgtcgctcaattaaaagcaggaagtcaaaaaatctctaataggttgcagatgatgcaaacacaacttaacggcaagccaacatttaaagatgatgcaagttataatgcagccgttgcgcaatatacagcattaaatggaatgattgctcaagttgaaagtacgattcccgccttacaagcagagttaaatgcaattcctgatcaagttgttaagacaactgattttgatgcgaaagcacaagcaattattgatgctgaaaaacaagccgggattatcttcagtgcacaacaagaagccggcattaaagctaagttgagtgcacaactctccgcttcagctaaggatgaagcacaacaaattgtttctggtatcaatgctaaaattgatgctaagaaaccaacggctgaacaatatgcacaattaacaactgctgttaaaggctcagtatcaatgttagatagtctcaaaaagattcaaacggctttaaattatcaaaatgatgccaatccgggattagttcgaggaactcaatcattagatactggaattggtgctcttgaagttcaatccaaagagttagtttctaatttatccagctatacaggtgtagtaacagaagtatctggtggttctgaaaaattagtaagcacgaatggtaaattggttgcaggcggtacgaaactagctgctggaacaaaacaattaaacggtcaagtgccacaattgacaagcggtgttggtcaattagcaacaggttcaaaagccttgtatgctggtacaacgcaattaaacggtcaagtaccacaattgacaagcggtgttggtcaattagctgctggttcaaaacaattagcaactggtactggtcaattgaatagccaagtaccacaattaacaagtggtgttagtcaattggcaacaggttctgaaacattgaacggtggtcttggtcaattaaacgctaagatcccaacgttaacgagtggtgttggtcaattagccgatggtacaagtcaattagctgctaactcagctaagttaaacgacggtgctggtcagttaactgatggtaacaagaccttagcaactgcccttaagggtggtgcaaaacaagttaacgatatccaattaacgaataagacagcggatatgttcgctgcacctgctgaattgaaacactcaaactatagctatgtccctaactacggtcatgctttagcaccatacgtgctttcattagccttattcgttggggcaatcgtcttcaactttgctttcccaattcggaaagtttcaatgactggtcaatcagcaacagcttggtacttaagtaagatttctgtcggcgccttagttgctgttggcatggcaatcatcgaaactggtttgatgatgatcgcagggttaaatgttgatcatcctgcccaattcttcttagtatcaattatgttctcattgacgtcgatggcgatcatcatgttcttatcgatgacgttcgataatcctggtcgtttcttggccatggttctcttgatgctccaattaggtggttcaggtgggacattcccaatggaaattacaaaccacttctacaatgtgatccatccattcttaccaatgacttactcaatcctaggcttcagacaagcaattacatctggtttaggtaacggtcaagtgctacaaacagtcttcacgttactactatttatggtagtcgcattgatcctattgtggttcggtatgaatcatttacaaaaaatcggtaatggcggtcgttcagtattagatgacaaccaaaaattacaagatcttgaaaaataaagcactataaaaaagaagcccttatcaatgcgataagggcttctttttgtatgatgattagcagttattaacgtccaagtaagtataaccgcggcggtcgtagcggttacgactccgggaatactcaattggttgaccgctatcgagatagacaacttgttcgacttctaaaactggatctgttggtgcgcagtcgagatattcttgatcatatttatcagctttgtccgcttggatattccggaaaccaccggcaaatgtcagatgaagatccttcttcagatagctataaatggaatcctcaagaatttcatctgttagaccaggtgcgaggctaaccggcatatacgtatgttctagaacgctattgacgccgtcaacaatccgtaagcgaataatttcgtaaacaggttgttgcgcgctcaaggtaaggcgttccttaacttcaggtgacgggaaagtgactttaaaggtaatgatcttgctggtgagcgtttgattagcatcggctaaatcaaacgacatcccccgatattgatcggctggtgcagtatttttattccaaaaagaatggtccagtactttggtgccagcgccacgacgagcaaaaacgagcccttccatggtgagaatcgtaatggcctttttaaccgtcatgcgactagcatcgaattcttcgacaagttcaacctgattaggtagcaacgaattagcaggataaattccttgcttaatccgctggcgaagtgtgtcggcgatctcttcatattttggcaaaagtaataccccgctttctatagtctagtttagagtaaaaagtggcgtaagacaatcattagtttgcaagtgtaacatattactacattaagtggtatcaagggctgcgaatatgagctgaacattaaaaaagcgtattatgatatggatttatcacaatacgctttataaaaaataattagctatcttgacgagttgctgcgatatcgagttcgcggatattaacagcttgtggcatgtcgtagatgaatttaacagattcagcaacgtgtactggatctaaggtaataccacccatactatctttccaagcttgataatccgttagggcaccttgatcagtaacgtgggtcaataattctgtttcagcagcacctggtgcgaccattgaaattcggacgtttttacctgagacttcttcgcggattgtttcacttaaaccgtgcacaccgaatttagaagcgacataagcggcatggtttacgaaagttttgcggcctgctaatgaagacatattgatgattgtgccgtgttggcgttcaaccatagcaggtaatacaatttgcgtgccgtttagaacgcccatgacgttcgtgtcaagcattgtttgccattccttggcgtcttgggtcaagacattccctagtaacataacaccagcattattgaccagtaagtcggtcggcccgaatttcgcttctgctttttgaatcgcaattttaaattccgcttgattagtgacgtcgactgattcgattaagacgttttcaaagtttaaaggtaagttagcgattttatcagcccgtctaccaagtagtaattctggatagccagcagtattaaaaattttagcgatttcggcgccaaatcctgagctagcgcctgtaataacgattaatggtttattcatagtggtcaaaacctgctttctatattatgctataaaaaggcatactacctggagctagctccaggtcaaggagaaaagatgacaacttatttaatcggtgagattgcaactaaaatgggtgtttcggtcgatacgctccgctattacgataaggaaggtttattaccatttgccaaacggaatacagctgtccaccggatttttacggatgatgatttaggttatctcgaagtaatcgactgcttgaaaaaatcagcgattccgattagagaaattggtcagtttattgattggtgtatgataggcgacgaaacactacctgaccgttacgattttatggtcgaacacgaacagcagttagaagctaaaattaaagtattagaaaccaacctagctttcttgcggtggaagaaatggtattaccaccaagccaaagaagcagggacagaagctatccatttcatgccaggcacaacgcaggttgatcctaaaagacatgaggaatatgaactaacgctaaaataattaagtttattaataagcgcagatctagttattaaaataatgaacactactatcgtgcaatgtattttctttagcaaattttagaggagaatacattgtttttttatggaaaactttggtgaagtaattggctgactgaaagccacacttttgcgcaactgtcttgacggttaattcgggatgctcgatgagtagacgcattgctttttttatacgtaaatcaattaggtattgctttggtgattgttggtagtaatatttaaagactttaatgagtgtgtattttgatttattaaaaatatcagccgcatcttctaatgaaatgtcctgatcgtagtggatatctagccactgacggtaatggcttaaccattctggatatttatcttgagccgattggtgagtatgttgactaattcgtaagagatcaaagaaaaattgtgctgatcgacttgtattttcgaaataatcactaaacgtattttggagacctatttgatttaacgctagacaatttttaacgaatacgggatgttccttaaagttcagtatgggcgtatcttgtgtcatttggtgccattgatcaataaaatgtggtgagaattcaaagtagataaattgccaatttatactatctggcgctaatgaataaatctggttaccaggaattgtcgctaaaaaggcgtcaccgggttttagggtgtaatgactatcgccaatttgtaaatgaccttgtcctttaattgtatattgaaaaaggcaatagttcccagttctttggcgacagtcccaataataatttgcagtgacagtttcatttccgccaccgattaaatgaaagtactgtgtgtgatcatagtgcagctgaaaagaatgattaagccccaatttattaccctcccattaaatttgttactcttgttgtggattagtattcattttattatagaataaataagtggaaataggatgtgataaaatgattagttttgatgaaaaaaaggcaatattttacctagataatgggcgtatcagtatggtcttagcaatcgttcaacaaaaatatgtaattcatcgctattttggtgctcatattcgtcagtatcatgaaagtaacactatccggtttacggaccgtggattagctgttaatccatcgacggatcgaacggtttcgttaggtgagttaccactgatttgtccaacacgagatacgggtgattatcgaatccctgctttaacaattcaacaagctagtcacaataaccaccttgacctagaatatcgtgattaccaaataattactgggaagcccaagttaagtgacttgccggcaacttatgttgttagtgacgatgatgcacaaacgctccggattaatttggaggatttgaaagccggtgtgcgggtagcgatgtattatacaatctttaaggatttagatattatcgcaacgcatcaagaagtgacgaatgttggacaacgagcaattacaattcagaattgtcaaagcttatcaatcgattttacacctcaaaagctatcctggttatcattgtacggggcacatattaatgaagctaatcgcaatcaacatcctatttatccaggcattcaaaaaatagaaagtgttcgtggtgcaagtagtccgcaacaccaacctttttttgcacttttatcacctaaaacaacagaatatactggtgtggtttatggatttcatttggtctatagtggtaatttcatgggacaagtcgagcaagatcaatacggtaatattcgcgcacagctaggcttgaatacagatacatttgattggcgcttagcaccgaatgaaacatttgtggcaccagaagctatcatgaattatagtacggctggtttaaacggaatgagtcagaattttcatcaattatatcaggatcatttagtaccgcgacgttttagccaccaggaacggccaattttaattaatacttgggaagcaatgtattttgcaattgacgctgctaaatgtgaagcattggcgcaagaagcgactgatgttggtatcgaactatttgttttggatgatgggtggtttgttgggcgtaatgatgatacgacatctttgggggactggtcggttgatcagactaaattaccacatggaattggacagttagcggatacgattaagcaacatggcttgtcatttggtctgtggtttgaacctgagatgatttcacggaaaagtaatctatatcgtcagcatccagattggtgtttacatgttccaaattacgaaccaatggaaggtagaaatcaattagtgttagatttaacacgcccagcggttcaagattatctaatacaaatgctgagacaacatcttagtactggaaaaatagattatattaaatgggatatgaatcgacatatgtcagatgtttatagtacggcagtcgatgatagtcaacaaggtgaggtttggcaccgatatattttaggcttatatcatgtgttagaagtgattacgaatgagttcccaacagtattatttgaaggttgttcaagtggaggtggacggtttgatccgggcatgctatattacatgccacagacctggacgagtgataatacagatgcaccaagcagagttgttatccaagatggctatagcctactatacccaccaattacgatggctgcacatgtgagtgcagttcctaatcatcaagtaggtagaacaacagatatacagacgaggtttgatattgcgaggtttgggaacctaggttatgaacttgatttaacgcaattaagtgctaatgagaaacaacagattaaacaacaaaccaaaattgcaaaaaaagaacggcaattaactcaatttggtcggttctatcgcttagttgttacagatgataactacactgcttggttgatcatcaatgaaaatcgtagtgaatttaatgtgttgatttacagtgaactagcacaagcagcaccgcattatccggtatttaaattaaattatttagatcctaataaggtatatcagtctgattcaggtgaacaatatggtggggacgagttaatgaatgttggattaacgttacctcgaaataagaccgattttcatacagttgtctatcattttaagtcttgttagtaaataaaaaagaggcagttgggataaaattattttatcccaactgctttttttttaaattgaattagattgtaataattttacgggcagtgtatagcgcatctctaatggagcactaggatcctcaatacgtagagtaattagttcggctaacagcgaggcaatctcgtcaatcggttgaataattgttgttagttgtgggaagtatttctgaattaactcagtaccatcgtagccaattagtttaagatcttgaggaatcttaatattttgattttgggcttcattcattacggaaatagcagttaaatcatcagtacaaaaaagaccatctaagtgttcttcacggagaatacgtgcaatttcaatttttttaagactattcgaagtggtacttttaatttggaagacaaaaggatctaagccatttttttgtagcacatctaaatagccattaagtcgtaaaagtgtcggtgaattagtttcgttactgccagtaataataccaatccgtttagcgccgaggttaatcaaggtattggtggcgatttgaccaccggcaaagttatcactggaaataatgggaatgtgtgtactcaatagtcgatcaaatgaaataacgggtgcactcattttttcatattcttgcagttcggtattatgacctcctgcaataataccgtctacttgatttgcggctaacataccaagatatgctttttctttttcaggttcacgattactgtcacaaagaatactcttgtagcctttatcaaaaagtttcttttcgaggcgttcaattaattctccaaaaaatgggttactaacagaaggaaaaataagccctatcatttgtgctttctttccttgtaacgatcttgctaaattattcggttgataatttaattcggccatggcggcatgaaccttatcaattgttttttggctgagataaccatagttgttaatgactctagaaactgttgtcggactgacctttgccaatttggcaacatccgttagttttgtaggcacgttttttccccctaaagctagtcatatcagttgttatttactttagataaaggccaaagttgtgctttttgtggtatttctgcccagattatattttgattttccgtggggaataggcgactactcatgactttggcaccatagttgatataaagttcaacgactgattgatctgcgaataagttaatatgaataggatgatggggttgaacattagttgttctgatttgaccatattgttggccaaatgagaccccagcgttagaacgattcattgtaattttaccatttgttgtatcgatagtaagtactaaaccatttgattttgagggattgctaaagacgtggagtgtttgactagtgtttgccggcacttcgagttctaattcataagcgttagttgtaggtattatgctttgtttactgagtgataggatttgttttgtttggcggagcgcttttgtttcttcgacggggtattgataaagttgattatcatggagtgttaattctttaactaggcttaggcaatgagcccaaccgtctttatcagttggatattcaatttcaggtaaacctaaccaacttactgccagtgcacgaccatctggagcattaaaagcttgtgtggcataacagtcaaagccgtcatcaagattagtaagctcagaaggctgcgtaatggtggttgtattgagttcgaatgaatgaccaaccacatacatatttggatagatgttctggtaagaaataacttcggatgttaaaccctgtgggcaaaaaattaaaaccggctgatgattaataaagatgaggttaggacattcaatcatgtaacctagtttttcacttgtaaaagctaattcgccgagtgggcgccaatcattaatgttattgtgatccgctttaaaaacggcaatcttaccaattttattgttatcttgagcgccaattagcgccatgatttggtcttgatacttaaaaatcattgggtctcggaaatgatcggtatagtggcgtggttgtttgattaggggttcagatattttgctgatggtacctgcttgacttagccatgcaccgttttgaaaaggtaatcgcttccagtcgctatttctgacgttaccggtataaaaaaggaagagtctatcgttaattggtaatgcactaccagaatacgcgccgtgactatcgaaatttccgtcaggtaataaaggagttgctttgcgccaattaataagatcatctgaaataagatggtgccaggattttagaccgtgaactggtcccataggataattttgataaaataagtgccattggtgattgaaataagagaaaccgttgggatcatttaataaacctgtatctggctgaatatggtaattaagacgatagggtgaattttggacacgattcaacaattgttgttgataatcgatggaccaatctgagtaaggttggtagcgtagttgacgtgtccagtttgtaattaatggcataataaactcctttgtgacatgttattcaataaatataatataaatgtaaacgtttgatatgtcaaacgtatgtcattcttttaaatccttataaataagtatagtatagatgttttttttataaaatatgataatcgtttgacataaaatgtaaacggttgtattatcgtatttgaaaagcgtttacaaaaatacgtaaaacaataatgttaaaaggagtgttcggcatgaatcataaggaagtagcgaaacgaatagctcaggcaattggaaaagataatgtggttgcggctgctcattgtgcgactaggttacgattagttgtgaaggacgtgaaagtaatagaccaagcagcattagataatgatccagatctaaagggtacgtttaacgcgaatggccaatatcaaattattgttggtccaggggatgttaatacagtttatgacgaatttattaagattgtaaatattaaagaagcttctaaagaagaattaaaaaatattgcggctgataataaagacaatattattatgaagttcattaaggttttaagcgatatctttgtgccattaataccagctttaactgctggcggcctattaatggctattaataatgttttgacaggtcaaggcttgtttggcgcacaatcaattgtccagatgtttccacagtggaaaggattcgctgagattgtcaatatgatgtcgtcagcgccatttaccttcttaccaattttaattgcattttctgcaactaaacgatttggtggaaatccatatttaggtgcggcagcaggaatgatgttggttatgcctaacctagttaatggttatggggttgctgaaagtatcgctacagggcatatgacgtattggcatgtctttggattgaatattgcgcaagctggttatcaaggtcaagtaattccggttattggagttgccttcattcttgctaatttagagaaattcttccataaacatttaaatgatgctgttgattttacgtttacaccaatgttatcgattattatcacaggatttttaacctttacattagttggtcctgcattgagaattgtttcaaatggtgttactgatagtttagtttgggcttatcaaacgttaggtgcagtcggtatggggatttttggcctgggttattcagcaattgtcttaactggcttacatcaaagcttcccggcaattgaaacgacacttttggcagatattgccaaaactggtggatcgtttatttttcccgttgcagcgatggcaaatattgctcaaggggctgcaactttcgctgtattcttcgttactaagaataaacaacaaaagtcattaacgacttctgctgggatttctgcgatgttgggaattactgaaccagcattatttggggttaatttaaaattgaagtttccattctttattggtttaattgcatcaggaatctcatcgtttattattggtttattacatgttttatcagtatcaatgggacctgcaggaattattgggtttattgcgattgcacctaagagtatccctagttttatgatgggagctattattagtttcgtaattgcctttgtggggacatacttatatggtaaaaaggcaatgaagacaactgaagaagaaataatcaatgaagcaccagctacctcagaagtagtggagagattacaagatgaaaagattagtgcaccagttactggacgaattgttgatttaacatcagtacccgatccagtttttgcaagtgaagcaatgggaaagggcattgcgattatgccaacttctcaggatgtacttgcaccagttaccggcgtgataacaattgcggctgatactggtcacgcatacgggataaaatcggatgatggtgcagaagtgctaattcatattggcttagatacagttaatttaaatggtataggttttgaaaagattgtccaacagggacaacatgttagcgaaggcgatttattaggtcattttgatattgataagattaaacaagcagggctaacaccgctaacaatgactattgtgacgaatacagcgggatatgcacaagttgatccgcttttaacagtcgacaaggctgctatgcaaggcgaagaaattattcaattacacgctaaaaaggattgaggggtagttatatgcaaactaactggtggcaaaatgcagtattttatcaagtctatccaagaagttttcaagatagtaatggagacggaattggtgatattcaaggtattattcaaagattagattacctagctgatctgggtgtaaatgcaatttggctatcaccagtttatcaatcccctaatgttgataatggctatgatatttcagattatcaggcaattaatccggaatatggttctatggtggatatggagcagttaattgaagcggcgaagattcgtaagattaaaattgttatggacttagttgttaatcatacaagtgaccaacatccatggtttttagaagcacgaaaatcaaaagataatccgtatcgtgatttttatatttggcgagaccctgcaaccgatggtagtgttccgaatgatttacaaagtaattttaaaggatcagcttgggcgtttgatgcggttactgggcaatattatttacatttttatgcgaaagaacaaccggatttaaattggcaaaatcctaaagttagagaagctgtctaccagatgatgacttggtggcttcaaaaagggattggtggttttaggatggacgttattgatttgatagggaaggaacctgaccgcaaaattaaggaaaacggaccgcaattacatgcgtatcttcaagagatgaacgcaagggtactttcacagtatgatgtagtaacggttggagagacatggggggcaacacccgaaattggccagatgtacagtaatcctaatcgccacgaactatcgatgatctttcaatttgaacaaattaatttagataaacaatcagggatgactcgctgggatttaaaaccacttattccagcagagttacatgcggtatttagtaaatggcaattagcgctagatggcgttggttggaactcgttattttggagtaatcatgatttaccgcgaattgtgtcacgttggggagacgatagccagtatcgtgaaaaaagtgcgcaagcattagcaatttacctgcatatgcttaaaggaacaccgtatatttatcagggtgaggagattggcatgaccaattatccaattacgagttatcacgaaattgaggatattgagagtcggcgagtttaccaacaacgacagcaacaaggctatgcgataagtgatatcctaaatgggattaatgctaaaggtcgagacaacgcgcggcatccgatgcaatggaatggtaagaatcaatcaggtttcacagatgggacaccatggttaccggtaaatcctaactatttagaaatcaatgttgaattggccaaacaagatgaacggtctatttatgcgacttaccagcagttaataaaattacgaaaacgtaacgcaattattcgccaaggccgatttgaaaatgtaccaacaggtaatcaaaatgtgattagctacaaacggatgttaggagaacagagttggttagttattattaacttatctaagaatagagaaagttatacgctacccattcagcacttcgggcctaatcaaaaaattattagcaataatttattattaaataaaatagcgacaagtggtgtattacagccgtatgatgcgttggttgtagctatcgggaatgaggaaaagtaacatgagtgaattattagtgggcagtgtggaagccggcggaactaaatttgtttgtgccgtgggagatgagcactatcaagttaaggataaagtaacatttgcgacgacaacgccacaagaaactttagcgcgagtagtcaccttttttaaaaaattcccaaatgtgacagtaataacagtcgcttcatttgggccaatcgaattgcggaaaaatcacgctaaatatggatatattacaaatactcccaagattgggtggcatgatgttgattttgtaggttatctaaagaaagaacttgcacggccaattatttttacaactgatgttaacggctcagcgtacggtgaatatgtagctgctcggatagcgcaacaacctgttgattcgttagtttactacacagttggaacgggtgttggtgccggtgctattattgatggtcagttaattggaaccttgggccatcctgaaatgggacacgttctcgtaaaacgacatccggatgatttaaaatttgaaggaatctgtccatttcacggtgattgcctagagggattgattgctggacccacttttgagaagcgagtaggcaaaaaaggacaggatgtcgatcagtcagacccagtttgggatattatggcctattatttagcacaagctgtggtgcaacaaaccttgattattcgccctaataaaattgttttaggaggcggggtagttaataaaatcttcttagataaagttagattgcaatttaaagaacaattaaacaattatgttgaagtccctaagttagaagattatataacgatgccgttagttgagaacaatggatcggcaacacttggagattttgcattagcgttaaaacaatacaatcagaaataagtgttaagaaaagctaagttcacttcaacttggcttttttattttgaccggaatactcgccattcttctaaatcatggttttcgtcagtgttagatatgactaaattgggtccaaagacttgctgggtagctgaatggccaatgaatccttctgagaatcagttattacacacggaaaatgcctcgtggcaatgggccagtgatttatacttcccggaattaggtaatgcgcgtcattttgatatcagtacggattacttaaatgcttttagttaatgattgttctaatcacttataaatagcgaaatttataataggctgataattaatcagtctattttttatgtatttaatcgagttatagttattctatattttttgatattaatttttatcttattaataactaaacaaatttctgtacaccactaagtacaattcggtaaagttaatctataacaagtgtccactattggatctagagggtagttgatatgttgaagactttacgaggtgcagataatgatcggtttaaaaaaattttatcgtcaacacgttgtaactgtaacgttcttattttttctaatcattagtatcgcaatggtcgccattgtttatttacaacctaataagattttatctggggccgattatcattttcacatgaatagagtggagaacttagcgctctcaattaagcatggcgattttttccctaaaataagttactttttcattggtgggatgggttatgctgcgagtcttttttatccagatacatttctttatctaccagctattttaagagtgctgggcttgtcgattaaagaaagtttcgtgatcttcgcaatttttatcaatttaagtacttttctggtgacttacggttctggtaaattagcagggtttagtaagaagaaggccttaatctttgctttactgtatggtcttagtatctatcgttttgctgatttagttaaccgtcaggcaatcggggaagtcatcgcgctgaccttttttccgttagtcattgtaatgatgaccaggttgaagtctggtaagcaccagcattggtacttgctagctgtggggatggttgcgattggttacagccatatgatttctgtagaaatgatgggtattttcatcgtgatctacacgttgttgaaccttaaggcgctctacaaaaatggtagttttaagtatttaatagcatccggtgggttgtcacttggcctattagcgcattacttcttagccgtgggcgaacaaatggcaacgacaacgtttcaagtttctgctcaaccgctagcctttttatcagaccgcacgctagcttttaaagaagtggtccgtaattcgttaaccaacgctgttttccacgcgaatacagtcaatgttggaatcacgattttgttaggattgggagtagcgtgttacctattctggcggtccaaaaatgaccgtgatttaattgtgatcgcactcggtctgtttataatggtcacgccattgatgccttggcaattattcgaccatacgattattaatacaatccaatttccatggcgtttttttgcaatcatcacagcaatcgtcagttacttgattgccaaggatgatttgcaattattgaataataagtactatttctacgctattattctgatgttaggcgtcggcaatgtcatttatgcgacaaacagtattcaaaatcaaagttggcgttttagaaccaatgcgcaatacaatcaacctaatccgtactatattggtgcagggcatgagtatctacccgaacagactgactatcaaaagattttgaagcataaaaagcaagtgattcagtatcaacctgctaaagtcaaaatagccaacgtccagcatacgtgggggcagtatcaattcgaatttacgacgcttaagcaccaaaaagcggttgtcgaggtcccgtttatttattacaagggctacgttgctaatattaaccatgagaaacgattgataccgatgcaaatgaatcctcaaaatggcttaacgcaaattaccttaaagggcagtgggcagatgacggtcttttaccagcaaacgccgcttcaaaaagtggggcacgtgattagtgtagttagtctgatttctttgatgatgattatttacaaggcgcaatctaacaaaaagctttactaagttagtaaagcttttttatttttagtaaaaacgatgttttatacgattattttactaataaaatccatttttttaatttttactaacttgatggctatcaagttctttcaattcggggccttctataatggagacaacagatagaaagaagggattcaaatgcgatttcaaagatggttgcaggcggttaagaatcaaatagcgttggccgtgggggtcttaattgcggtggcttatggttggtactggttaggtgggccggttgttgtgatgcaagggttactgttagttgcttcagtgcttggggtggcgccgattttgatgcaggcttaccaagccttgaaggtcaaggtggtgagcatcgatttattggtgaccattgcggtgattggggcctttgttattggcgaatacaacgaatcggcgattgtgacctttttgttcttattcgggagttatcttgaacaacgaacacttaaaaaaactcgggaatcaatccggtcattatcggagatggcacctcacaccgcacaagtggttgcggatgatggggctgtgacggcagtcgatgtcgacgatgtggtaattggcgatcacgttttagtcaaagcgggtggtcaggtgccagttgatgggacggttatcacgggaagtgcctttgttaatgaagccagtattacgggtgaagcacagctggttaaaaaagaagttggcgccagcgtctattctggcgcgattgtcgacaatggcacgctgaccgtagtcgctaatcaagttggggatgacacgacttttgcccaaattgttgaattggtggaagaagcgcaggatagtaaatcaccggcggagaagtttatcgatcgttttgcgacttactacacaccagcagtgttggtattagcgttagtggtcggcttgatcacacgcgattttaaattagcgattacgattttagtgttgggttgcccaggtgccttagtgattggcgcgccagtttcaatcgttgctgggattggtaacggtgcgaaaaacggcgtcttgattaaaggcggcgaggtagttaacacgatggccgggatcgatacaatggttttcgataagacgggtacgctcactaaaggtgaaacggcagtagcacaagttgtgaactatgcggctgatgaagcgattgttttgaaattagctgcagccgtcgaaaagcaatcggatcatccattagcgctggcggtggttagttatgcccaacaacaaggcttaacggctttacctattgtcactcacattgaaacgctcaaaggactgggcgttaaagcccaagttggggaacaattggttcgaattggccgcgcgcagttattgacggacgccggtattatcgttaataagcaacaacgcgcggtgattgaagccagtcaacgagctgggcaatcaacggtgttggtggcgattaatcaaacgttggcactgattatcgggattgcggatacggtgaaaccagaagccaaagcagctttggcccgtttgagaaaggccggtgttaaaaatcttgtgatgctgaccggggataatgaacaaacagcggcagccattgcccgtgaggtggggatcacagaatttcacgcgaacttgttaccagcggagaaggttgattatttgaagacgtatcaagcaaaaggccaaaaagttgcctttatcggggatggtatcaatgatagtccgtcattagcgcttgcggacattgggatcgcgatgggttccggcacagatgtcgcaattgaaacgtcggatattgtattgatgcaatcgacactttctgaagtcgtctacgccgattacctcactaaggcgacagcccataatacggtccaaaacatcgtgattgcggttggaacggtcgcgttacttctattaggattgattttaggctacgttcaaatggccagtgggatgttggttcacgaaatcagtattttagtcgtcattttaaatgcgatgcgcttaattcggtttaaagttcgctaaacttgatggcgatcaatttttaatcatgcgactggcagtatagtgaaggtatcaagtgaagaaaaggtggtttttgttatggcgaagttagtaatgcaattagatgaactctcatgtccatcatgtatgcaaaagattcaagcgggtgtcagtcaacaagcaggcgtcgaatcggtcaaagtactatttaatgcaagcaaagttaaaactgaatatgatgaaacaacgactaacccagaacaattgacccaattggtcacgaatctgggctacaacgttaaaagtgtgaaggttaaatagggggcattgagatgttaacaacagcggcaattgaagaacgttaccaagcagaactgaaacaagcggatgtggatcaccatacaccaacggctggtgcaatgatcgggcacattatggctaatctcacaatccaacggcgcaaactccgtcagatgaagtggtctaccaaagggattgataatggcaccttcaaggcacaagtggcaactttattaacagaaaatgatatgctattagataagacgactgaacgattattggatgagggtgaagtaatcccgacgacgcaagcagaatatactgaatacgggatgcttactgaagatgcccgcatcaagtattgggatgtgccagctatgatggcggaattggtcaacgattttaacaccgccaacctattcgtatcacgggcgatcaagctcgcccaaaaagaagaacgatttgctttagcaactgatatgattgatatgctagggtataaccaacatcaaattcgcgtattgcagagccaactcggtaaggatgcacgcgaaggcttagatgaagaagatgacgactaaatagaaggaagtgggcgtgtggcaactgttgaacaacatatttgtgcagaactagtaccgatatttagtcaccttgatcacgatagtctcctgaaggtttcggcgctaacgcaccacgaaaaggttgctaagggtcagcaagtcataagcccgactgcgcaaaaacgcctagtgattctggctagtgggagtattaaggtttatcaattatccgcagcgggtaaagaacaactattgcggattatggagcctggcgactttgaaggtgagaaattactctttacgaatcaagaggaacaagtatatggtgaggcactccaagacagtgtgatctgcacattgcctcgcgcaccttttcaagaactactattaacttatccggaaattagtttgaaacttttagaagtaacggctaataagatgattaagttggaacaacaagctaatctgatgaatatcgaatcggttgaatcgcgaattgtgacttatctattggctttggtgaaggtcagtgagacgttgacggttaaaatcccgatgaagttaaaagaattagccacttatattgggacgacgccggaaactttatcgcggcaattgaagcaattagaacagcggcaattgataaaaagacaaggtcgacaggttgaaatattagattatgaacgcttggaagacttctattagtagtgattatggcgtgttggtcaacaaatttgagagatttgttgaccaacacgttttttacctataccaattcgttgaaatagtggcgaaatcgcgatttataagtgttgtaagggataatcagtagcgcaattagggatgctttttagtggattaaaacgttttttttaagcttggcaaaggttattttcaagttttttaaaaaatattgaaaatagtgattgacgttgtcccactaggatggtaagatattctatgttgtcgagagatgaacatgtgattgagaagttgataaaaattatttttaaaaagcagttgacatcaacttgatcacatgatatgattaattgcgttgcttatgagattttaagttttaagtaacggcgattcatataaggtagacctttgaaaactgaacaaagttttgataaaccaaatgataatgattaacccaaacattaaaatatgattgatattcgtcatatttattaaccaattaagcatataaaaaagaagctcatcacctttccagtgacgagcttctttttatttacatgattatttatttttaatcgttgagattatgctgttggcataactaacagaattgacttcccgctcacttgatcaccgttatgctctgtgaaagcaatatttgttggtaaactagcttgatcaatttgtgatgtgtcaaatgaaaatgataggccatcttcactaacggtcacattgtactttttgttggtaaacatatcaaccgcttcaatcgtatgacctggcgtactgattttaccgtttacaacttcaccccatttaactcttgttgcgtccaatgaaagtgctggtggtactgcattatcatgttccacaatcgctgtcccaaatcctttagcccctaatgctgttgcttgatcagcaaatagttttgtaccagctttttgttggataatatcagcaatgtaagtcccgtctacgccagcaattgctgtcccgataactggaccatcttctgaattagcgcgaatcttaacagttgatccggctggtgcgttaccaccaattacttttgtatcagtatctttaactggtgtgtgaattgttggcacttggttaacgattgtccaaccttgatctaatttatcccagttgattttaccttcagattcagcatttcctaataagctccagtctggaattgcgtctgctgaagaaacaactgacttgaattgatagaatgacttgttataagcatctggaattcgttcgcctaaatctgtaatcgcttgacctaagtcgatataaacatgtgcttcaagtgtttgactgctaagtaagttaaacaagccgatttgattttgtaagattaaaacgttatttgtacgatcgtatgaaatatctgagcgtttataagtatatttctgtgtatgtccaccttgattattaggtgcatagaagtaacttgatggttcgatataatctaagaatgttttaccatctgctgttgttttattcattaacgctttaaattcatcaggcattacgatttgggtttttgttttttctccccatgcaagagctacagttgtcttaccagtatatgaaatttgtaaaataccagaagtcaatgagaagtcatttgatagatgaacaccctctaacatatttgatccttcaaaagttgttgatccttccgttaagaatccgatgcccgcttttggatctgcaatcttagattgtgcttttgtgtccaccttttgcgttgttttcgctgaaccattatctgcggcccgtactgttgcaacacccgtgctcaccatcaaacccaatactgttaatgatgctaataatacactaaccatttttgtactcttaatcataattttcgcctccatgtgcgttttttattttttagcagcgacgcttattagtcaatgacgttaattgcctttgctatgtgaataatgtatcatctcttttttgatagtgcaagtgatattttcgattagtttttactgatgttaccaaacttattggcgctgtaagcgttacaaaaataaactttttttaaatttcttcttccgagcatgttatttttttaacttgtttactattatattttgagacatgtaaatataatctaatccttatataaatcctattataccggctgttttcaggattcatgataggattagaaataattaaccgtcgatactaaaaaagcattatctgtaaaatcacccttttgaggtcattttatagataatgctttttggattgttcattaacgtaatatcactaaaccaaccgttaataccgccattgcaacaaacgcgagtgtatctcttgtttgccattttaggacgcggtatttactgcggccttcgccaccttgatagccacgggcttccatagctgtcgctaaatcatcggcccggttgaagctgctgacaaatagcggaatcaaaatcgggataatggatttcatttgttgtaagagactaccttctccgaaatcaacaccccgcgcacgctgcgcattcatgatcttcgtcgtttcatccatcaacgtcggtacgaagcgcaacgcgattgataacatcaatgcgacttcatagactgggaaatgaatgacttttaacggcttcagaatcgattcgatcgcatctgctaatgataacggtggtgtcgtcaacgttaagagcgtcgacatgaagataatcagcacgaagcgcatgaagatatatgccccgttgagtaacccgaacttggtcaggctcaagaagccccattgccaatagacggtccccccacgcgtgaagaagatttgaagtaaaacggtaaagaggatgagccacaataatggccggacccctttcaagaagaaactaagtttaattttcgaaattagaattaaggccatcgtgaaaccaaataacaagagataagctggccatgagcgtgctaagaaaatgatcccgatgtaatagaaactggcgattaacttcgcccgcgggtccattcgatggaggattgaatcccccggaatataacggcctaagattagtttattcattagcgccacctgctccctgcggtaattgatcgcgcaacatcgctgctaattcgtgttctgttaatggtaccttagggaatacaaagcccttcttgattaatgcttgggcaaactgcgtcgtggttggtaggcctaattgcttagacgttagccactcagggtccgcaaaaatttcgcgcggtgtcccactcttggcaatcccgccattttccaaaacaacgacatgatccgcatagttggccacatcgtccatttgatgcgtgaccatcacaattgtcataccttgttcgcggtgtagtttttcaaataaacccatcatttcccggcgcccgactggatcgagcccggcggttggttcatcgagaattaagacctctggctgcatagccaagacaccggcaattgcgactcgccgcatctgaccaccggataaatcaaacggtgattgttctaaaacggcttctggtagaccaaccaattcgaccatcgctttagcccgttcaagtgcctcagcttcaggcacaccgaaattttggggcccgaaagcaatatccttttgtaccgtggcttcaaataattggctttctggaaattggaagaccataccgacattttgccggatgaccttcaagttcttattattcgtttcaggcgtaatctggcgttcaccaatctgcacgaccccttcagtcggcttcaacaacgcgttcaagtgttgcaataacgtcgatttgccactgccggtatggccgattaatgccgtataagagcctgattcaatcgttaaattaatgtgttttaacccaatcccttgaaaaggtgtcccgggttgatacgtataacttacatctttgaatgtaatgtccataggtgatcaaccatcctttccgttgtgagatagtcaactggcatcggtacaccgagcttagtaagtgctgctttgagtttctctggatatgggacatctaacccaaggtcgagcaggcgttgcccatatgcgaagatttcggctggtgtcccttgatcaatcacttgtcccttatccagcatgacaatccgatccgcactagcggcttcgtcaatatcatgggtaattgaaagcacggtcatattcgtttcttgtttcaacgtatgaatcgtctcgaggacttcttggcgacccttaggatcaagcatacttgttgcttcatcgagaatgaggatctcaggttgttgggcaataatgcccgctaatgcaactcgttgcttctggccaccagataaacgacttggttcgcgcgtcataaattgggtcatacccacgcggtcaactgcatcttgaacccgccgctgcatttcagtccgttcaatcccttggttttcaaggccaaacgcgacatcatcttcaaccgtcgcaccaacaaattggttatctgggttttggaaaaccatgccaatcttacggcgaatatcccaaacggtttcaatcgataaaggcaagccatcaatcgtaatatctcctgactgtaaatctaataagccattcagggatttggcaaacgtactcttgccactcccattatgcccaataattgcaacccactcaccagcattgatgctgaccgataaatcattaagggccaagcgactcgcctgtgggtattcatattttaaatgtgccacttctatgattttattttcatccattgagaatacctaatttcatgatttagagtgccgttcaaagcgttttggctctgagcattagcctagtatcgtgaataagcgatgcaatcgattatttgcgatgcgtagctaagcacaggaagttactactaatggcacgtttcactttagagtgccattaaaagtggttaggttccgagcatttacctagttccgtgaataagcgatgcaatcgcttgtttgcgggacgtagtaaagcacaggaagttgctactaatggcacgtttctactaaaatcgccccaccacttgcttatagggctgcgaaactaccctctattttatcatagaatccccttaaagtggctgtgtaagtcgctctgtttataaatccacttaacacaaaaaacgcctaactctgtaaacagaattagacgttttattatgtaaatcatcaatcgatgaaagttatgctgtggtgctaacataaccttaggactagacttggcaaataaatgccatcatcataacgccctgtctcatcgatcaaatgacctagaaatcattttttattattaaacaagttcaataataaccattaatgcaccgtcaccacgacgaggggctgttttaagaatacgtgtgtaaccaccatttctttcagcataacgtggagcaatgtcactaaataacttttgtaaagcagattgaacgattactgcttcgtcttcttcgcgaatatcagctacttcgttacgaacgaatgctgcagcttgacgacgagcgtgtaaatcaccgcgtttacctaaagtgatcattttttcagttgttttacgaatttctttggcacgagcttcagtagtaacgatacgttcattgatgattaaatctgtagtcaaatcacgtaacattgctttacgttgagagcttgtacgacctaatttacgataactcatgaatggagtccctccttcttatcagtttattcttctgtgcgtaagcctaagccaagatcaaataacttgttcttaacttcttctaacgacttgcgaccaagatttctaactttcatcatatctgcttctgatttgtcagttaactcttgaacagtgttgataccagcgcgtttcaaacagttgtatgaacgtactgataaatctaactcttcaattgtcatttcaagcattttttctttatgcgtctcttctttttcgaccatgatttcagcattcttcgcttcatcagtaagatctacaaagattgccaaatgctctgtcataatcttcgcagctaagctaatagcttctctaggactgatggaaccgtttgtccaaacatcaagtgttaacttgtcgaaatcgttacgacgaccaacacgtgtactttctacttgatagttgacacgactgattggggtataaattgagtcgattggtaaaacaccaattggcatatcgtctgacttgttttgaacagcagcaacataaccacggccttttttaactgtcattcgcacgtggaaattgccgccttcagctactgtacaaatatattgatcagtatttaagacttcaacatcgtcatccgaaatgatatcagcagcagtaactgttgctggtcccttaacgtcaatctcaatcgttttgtcttcttcaacgtgcaatttaagtgctaattttttgatattcaagatgatttgtgtcacgtcttctaggacgccatcaattgttgaaaattcatgtaagacaccatcaatttggatatctgtgacagcagtaccaggtaaagatgccaataagatacgacgtaaagagttacctaaagtcgtaccgtagccacgttcaagtggttcaacaacgaatttaccgtagttagtactttcatcaacctttgtaatgtttggtttttcaaattcgatcattcttatcttttacccctttcaaaacgagaagtgtttatacgtgaacacgtttcagtttgtctcaaaatgaagcgtagcccagactaaacacgacggcgttttggaggacgagatccattatgaggaactggtgtgacgtcacgaatagcagtaacttctaaaccagttgcttgtaatgagcggattgcagcttcacgaccagaacctggtcccttaacagcaacttcaatagatttcataccatgttccatggcttctttaccagcagcttctgcagccatttgagcagcaaaaggtgttgacttacgactacctttgaaacctaatgaaccagcagatgaccatgcaacagcattcccgttaggatcagtgatcattacaagagtgttgttaaatgttgagtgaatatgtgctacgccagcttcgatatttttctttacacgacgcttacgtggtgcattcttcttgtttgccataaattataacctccttttactgattattttttcttgcctgcgatagaaactttcttacctttacgtgtacgagcgttgttcttcgtgttttgaccacgaactggtaaaccacgacgatgacgcatgccacgataagaaccgatttcttgtagacgtttgatgtttaagctaacttcacgacgaagatcgccttcaactttaactgtatctaatgctgcacggatcttgtcttcttgatccggcgttaaatcgcgtgtacggacgtctgttgggacgccagcatcagccaagactttaacggcagttgtatttccgattccgaaaatataagttaaagcaatcacaatttgtttatcacgtggtaaatccacacctgcgatacgagccattcttgcacctcctgcttattaattaaccttgacgttgtttatgttttggattagctgcgcagataatcataacgcggccttttcgtttaataactttacaatgttcgcacattggttttactgatggtcttactttcatatcgactgacctccttgatatgatccttacgcctatttaaagcgatacgtaattcgtcccttagtcaaatcatatggtgatagttcaactgtcacacggtctcctggtaaaatcttgatgtaattcttacggattttacctgaaacgtgtgccaaaatcacagcaccgttttcaagttctactttgaacattgcatttggtaaagtatcagttactttaccttcaatttcaatgacgtcatcttttgccacgcaaaagtacccccttgtggttatgaaaattcatacagaaaaatggtgagagctctccgcactcaccctagtgtcataccgagatattatatcacaagcattaaatttttaaaagcactgattacttagtcattaacaacaagtcaggcttttacgtgaataatgacctaaaagatcacttgagttgatgactagtctttaatggtatcaagtacttttttaacggcagcgaacacgtcatcaatttcttgattcccatctaccgtgtaaagcaggttacgtttttcataaaaatcaagtaaaggtgtattcatttcgatattgacctttaagcgattcttaaccgtttcaggtttatcatcttctcgttggaagaagacgtggccgccacagcgatcacatgtgccttccacttgagttggatggtaaagcttatggtacgttgcaccacaagttttacaaatgaagcgaccagataaacgatcagccaagatttcaggatcaacatcaatgttgatcacaccatctaaaggtttgttcaatttatcagtaatcactgccaaagcatccgcttggtcaagtgtccgaggaaaaccatcaagaagataacctacattagtatctgcttgtgaaagacgttcctcgacaattccgtttgtcacatcatctggtaccaattcacctttatcgatgaaggccttagctttaacaccaaggtctgtttgatctgccatagcagctctaaacatatcaccagttgaaatgtgtggaatatgataagcgtcaacaatcttttcagcttgcgttcccttaccagcgccaggaagtcccattaacatgagattcatgcctttgcctcctatttaaaacaaggattcaatactttttaaacgataattgcttatcgaatgaagccaacgtatttccgtttcatgagtaaaccttcgagttgacgagtgctttcaagcgccacaccaacgacgattagtaaactagtcccacctaaaccaattgattgaggtagaccaccgaggtttgctgctaattgaggtaataatgcaattacccctaagaacaacgcaccgacagtcgatagtcgcattaatacgctggagagatatttctcggtacctttacccggccaaacacctgggatataactcccttgtttggtcaagttctcagcaactttttcagggttaacctgaacaaatgcgtagaagaaggtaaagagaataatgagcaccgtataaacaatcgaacctgtcacagtttgcatactgaagatgtctgacataactttgaaccaagcatcttcaccatgacttgcctggaaggccattaagattgtttgaggtgtcataataaatgaactagcaaagataaccggaatcacaccagcaacattgacctttagtggtaagtaactgttgtcacctgcacctgcttcgcgacgtgtatattggattggaatcttacggttcgcttgttgaacccaagtaacgaaagtcacaatgactaataccgctacgattaagccaacaacgaacaagattcctaaccacatttcacccttagaagcattcaagacatgttccttgatgatttgatgaaggccacttgggaggcgcgcaatgatacctgcgaagataatcattgaaacaccattccctaaccctttatcagttatctgttcacctaaccaagtaattaacatcgtaccacccgtaaggatgatcccgatgctaacgaaggtcttaattcctggatctttaaccaagcccatttgactgagtgagttaaagccagcagtaatcccaattgattgaataaacgctaagatgatcgttaagtaacgcgtcacttggttaagtttacgtctcccaatttcaccttgcttgctccattcaacaaatttaggcacaatgtccatttgtagtaattgaaccacaatttgggccgtgatgaatggtgaaacccccatcgagaagatggagtaattcgccaagccaccaccactaacagtatcaagtaaaggaatcaaaccagttgatcctaacttggttaacgcgccagcgttaacacctggtactgtaatctgtgcacctaaacgataaacgatcaaaacgcctaaagtgaacaaaatcttactacggatttccttgactttaaatgcgtttcttagtgttttaagcaattaaatcacctcaattgaaccgccagcagcttctacagcagcttttgcagcttcagaatacttgcttaccttaatgttcaattttttgtttaattcaccatttgctaatactttaacacctgaaagttcgttcttaacaacacctgcttcgattaatacagttgctgtgatttctgtaccgtcttcaaaacgatttaaatcgttaaggttaacgacagcatattctttgcggttgatgttcttgaagccgcgttttggcatacgacggaataaaggcatttgcccaccttcaaagcctaaacgtaccttactacgagccttttggcctttttgtccacggccagctgttttaccagtacctgaagacgtaccacgaccgacacgcttgcgaacatcgcgagcaccttcgttaggtttcaattcatgtagtttcattattgtgcgcacctccttgcaatatatgttgaaattagtctttaatttcttcgactgttactaaatgtgcgagtttgaaaatcacaccgcgagttgcagcatcatctggtttgattacagaactatttactcggttcaagccaaattctttgaccattttacgttgttctggaagacgatgagcagcactttttcttaaagtaatctttaatttagccatgttcagttatcctcctagttttgtaagctttctacagagatattacgcaattctgcgatttgttcagcagtcttcatacgagttaaaccgtcaattgtggcacgaataacgttgatagcagttttgctacccaatgttttacctgtcacatcatcgattcctgctaattccatgacggcacgaacagcgccaccagcggcgataccagaaccttcaacggctggttttaatagaacacgaccagcgccaaagcgaccgataacttcatgaggtaaggttgtaccaaccttaggcacattgattagattctttttagcgtcttcaacggctttacgaatagcttcaggtacttcttgagctttaccagtaccgaaaccaacgtgaccgtttttatcaccaacgattacgatagcagcaaaacgtagacgacgtccacctttaacaacttttgtaacacggttgattgaaacaacgcgatcttctaagtctaaatgagttggatcaatgtaagtcataaatggttttcctccttattagaattctagtccgttttcacgagcagctgtagctaaagcagcgatacgaccatgatataaatagccgccacgatcaaagacaacaactttgtggcctgctttaactgcacgttgtgcaactaatgcgccgacttgttgtgcttgttcgactttagttccttctacttttacttctttatctaatgttgaggcacttgctagcgtcacacccgctacgtcatcaataagttgagcgtagatgtttttgttagaacggaaaacgttcaagcgtgggcagtcagcagtaccagagatcttgccacgaacgcgtgtatggcgtttttgacgtgtcttattcttgtctggttttgaaatcacaattttcacctcttaatgttgtttaaacagctaggctgctttatttaccagttttaccttctttacggcgaacatgttcatcagtataacgaatacctttgcctttgtaaggttctggaggacgtacatcacgaatttcagctgcgaattggccaactttttgtttgctaataccgctgataatgatgtttgtgtttgatggcacttctacgttaacaccttctggtgcttccatttcaactggatgagaataaccaacgtttaatactaaagttttaccttttaattgagcacggtaaccaacaccgataagatccaatgtcttcttaaaaccttccgttacgcccaaaatcatgttgttcaagttagcacgcattgtaccgtgcattgcacgatcactatcactactacgtgtaaagttgataaggttaccttcttcgtgcatttcaatgattggattgaaatgacgtgttagttcacctttaggtcccttaactgtgatgttgttttcaccgtctttagtaacggtaacacctgcaggaacttcgattacttttaatccgatacgactcacgttacagcacctccttaatttgagtttagattaccaaacgtatgcgagaacttcgccgccggcagccttttcacgagcttctttgtctgttacgacgccgttacttgttgagataatagcaattcctaaaccatttaataccttaggaacttcgttagcttttacgtaattacgtaaaccaggttttgaaatacgtttcaaaccagagataacacgttcgttattcttaccatacttcaagaatacacggatgataccttgtttgtcgtcttcaatcacttcgtaatcgcggataaagccttcgcgtttcaagatttcagaaatatcttttttaatacgtgaagcaggaacttctaaagattcgtgacgtaccatgttggcgttacgaatacgtgttagatagtctgcgataggatctgtcatgaccatgtggattaacctcctttattgaatcttttgattaccagctggcttttttcatgcctggaatttggcccttatgagctaattcacggaggcaaacccggcaaagcttaaacttacgatatacagaatgtggacgtccacaacgttcgcaacgtgtgtattcttgtgttgagaattttgcaggacgatgattctttacaactaaagattttttagccaagaaattgacctccctttttatttagcgaatggcatgccaaattgtgttaacaattcgcgtgcttcttcgtcagtgtttgaagttgttacaataacaacatctaaaccacgaacgcgatctaccttatcataatcgatttcagggaagatcaattgttcgcgtacacctaatgtataattaccgcgaccatcgaatgattttgcactaacaccgtgaaaatcacgaacacgaggtaaagatacgttaactaatttatctaagaaatcgtacattctttcgccacgtaaagttactttagcgccgattggcataccttcacgtaaacggaagccagcgattgattttttagcttttgtgattaatggtttttgaccagcaatcaaacctaattcttcaacagctttgtccaagttcttagcgttagaaacagcatcaccaacacccatgttaagtacgatcttttcgatcttaggtacttgcatgcttgatgtgtagttgaatttttcgatcaacgctggtgtcatttctttaacatatttttcttttaaacggttagtcatgtaaaaagtgcctcctttccccaaaagattatttatcgattgattctccagttttctttgacacgcgtactttcttgccatcgacaactttgtagcctacacgagtagcttcgttgtttgatgggtcgattagcatgacgtttgaagcatcgatacttgcctctgtatcaacaatcccaccattaggattttgagcatttggcttaacgtgctttttaatggtattgataccttcaacaacaactcgaccttctttaggcatagctttgatgattgtaccttctttacctttatctttaccgctgattacttttactttatcaccagttttaacaaacattgatatacgcacctccttggtagtctgtaattatagaacttcaggcgctaaggaaacgatcttcatgaaatcactgtcacgtaattcacgtgcaactggtccgaagatacgtgttccttttggagtcttgtcatcattgatgataacagcagcgttttcgtcgaacttgatgtaagaaccgtctacacgacgagcacctgacttagtacgaacgataacagctttgacaacttcaccttttttgacaacgccacctggtgttgcctgtttaattgttgcaacgataacatcaccaatattggcagtcttgcgacctgagccacctaaaactttaatagttaaaatttcacgggcacctgagttatcagcaactttaagacgactttctgattgaatcacttataggtcctccttccgtcacttaattatatgagtaacgatttagataataactgctttttcaacgacatctaataaacggaaccgttttgtacgtgacaaaggacgagtttccataacacgtacaacgtcgccaacttttgcttcgttgttgtcatcttgtgcataatatttctttgaatatttaacacgtttaccgtattcaggatgtgttttataagtttcaaccatgacagtgattgttttatccattttgtctgaaacaacacggccttggtacactttacgatggttacgactttcttcgctcaaagtaaatagctcctttccatttattatttgttaagttcttgttgacgtaatacagttttaatccgtgcaatgttctgacgaacttgctttaagcgggcggtattttctaattgaccggtagcttgttggaaacgaagattgaataattcttctttgtattggtgttctttttcaagcatttcagcagtggttaattcaataatatctttagccttcatttgactcgccacctacttcctcgcgttttacgatcttagttttaactggcaatttatgtgatgccaagcgtaatgcttcacgagcaacttcttcagaaacgccgccgatttcaaacatgatcttttcacgttttactacagcaacccatccagcaggagcacccttccctgaacccattcgaacgccgacaccttttgcagtgtatgatttatgagggaaaattttaatccacactttcccaccacgtttcatgtaacgagtcatggcaacacgggcagcttcgatttgacggttggtaatccaacttgattctaatgcttgtaacccgaattcaccaaaagtgacttctttgccaccttttgcagcaccgcgcatcttcccacggaattcacgacgatgttttacacgtttaggtactaacatgtttatttccctcctttcgtattgttgttggctttagcaggtaatacttcgccccgataaatccaagtcttaactcctaatttaccgtaagtagtcatggcttcgtcccatgaataatcgatgtctgcacgtaatgtatgcaaaggaacagttccttgagcatgtgtttcgatacgagacatgtcagcaccgttcaaacggccggcaacttgagttttgatacccttagcaccagcgcgcattgtacgttgcatagcttggcgttgagcgcgacggaaagcaacacgtgcttccaattgacgagcaataccttcgcctactaaatgagcgtctaaatcaggtttcttgatttccacaatgttgatgtgtactttcttgcctgttaagttatttaaagctttacgtagattttctacttctgagccgcctttaccaatgaccataccaggtttagcagtatggattgaaacgttcacgcgatttgcagcacgttcgatttcaatagtagagacagatgcgtcagctaattttgtgttgatatatttacgaatcttaagatcttcgtgtaagaatgttgcgaaatctttttctgcataccatttagcgtcccaatcacggatgacgccaacacgaaaaccggttggattaatcttttgacccacgcgatatccctccttatgcttctttttctgatacaactacagtgatatgacttgtacgtttgttgattggtgatgctgagcctttagcgcgaggacgaaaacgtttcaatgttggtccttcgttagcgtaagctttcgtaacaaccaagttttctgcgtctaagtcataattgtgttctgcgttagcgatagctgacttcaaaactttgataacaactggtgaagcagctcttggtgtaaattctaagattgcaattgcttctgcaacactcttgcctctaatcaagtcgattaccatacgcactttacgtgcaggcatgcgaactgacatagcactagctgttgcactagtaatttgatctgccattgagattcatcctcctttctagcgtgcttttgttttcttatcgtcatttccatgaccatggaaagttcttgttggtacaaattcgcctaatttatggcctaccatatcatctgagatgaaaacgggaacgtgtttccgtccatcataaacagcgattgtgtaaccaataaagctagggaaaattgtcgagcgacgggaccaagtcttgatgacttgtttcttttcgctgtcggcttgtgcttcaatcttgttgagcaagtgagcgtctgcgaatggtccttttttcaaactacgactcattatgaaacctccttcgaatgaaaagtgcaacgtgccctaattgcttaggccgcgttggctttggataagttcaatttaaattgattatcttgatttacgatgacgaataataagtttctctgaacgagccttactactacgagttttcttaccaagtgtcttcttaccccatggagacataggagaaggacgaccgattggcgctttaccttcaccaccaccatgaggatgatcgttagggttcattactgatccacgaactgtaggacgaatacccatccaacgtttacggccagctttaccaatcttgattaattcgtgttgaccgttaccaactgtaccgaccgttgcacgacatgtaagtaggatcatacgtgtttcgcctgaagttaaacgaacgatagcgtatttgccttctttacctaataattgagctgatgtaccagctgaacgaaccaattggccgcctttaccaggttttaattcgatattgtggataagagtaccatcaggaatattagctaatggtaatgcgttacctactttaatatcagcattaacaccagattcaacgatcatacctacttcaaggcctttaggggcgatgatgtatgctttgataccatctggatattggattaatgcgatatttgatgttctatttggatcatattcgattgacttaacagtcgctttgatatcatccttaatacgcttgaagtcaatgacacggtaatattgtttatgaccgccgccacgatgacgaacagtgatatgaccatgtgcattacgaccagcagtatggctttgggattccaacaacgtcttttcaggggttgtctttgtgatctcagcaaaatctgagctggtcatgttacgacgaccatttgtggttggtttatacttaataattcccacgtgtatgccctcctataatttattctatttaatgttaattaatcttcaaaaatcttgatttcttttgagtcagctgttaatgtcacgattgctttacggcgtttcttagtgtaacccgcatagcgaccttggcgttttaacttgccccgaacgttcatgatattaacgtttttaacgttgacaccaaagatttcttcgattgcgtaacgcacttgtgttttgttggcacgaacatcaacatcaaatgtgtatttcttgtcgtccattgcagccattgagctttcagtaactactgggcgtaaaataacatcgcgtgcttccattatgcaagcacctcctcaattttagaaagagcagcttgagtaaggattaatttttggttgcctacaacgtctaatacgttgataccatcagcaggaacaactgttacgttaggtaagttgcgagctgataaagcagtaaaatcatttccgtcttcaagaactactaatactttagtattaacatctaacttgttaagtacttcagcgaattccttagtcttaggtgcatcaaagctaaatgaatcaacaacgattaaatcattatcgataaccttttgtgaaagtactgacttgattgcaagacgacgtaccttacgaggtaatttatagctgtatgaacgaggtgtaggtccgaagacaacaccaccgccacgccattgaggtgaacggattgagccttgacgagcacgaccagtacctttttgacgccaaggtttacgaccaccaccacgaacagctgatctgttcttaacagcgtgtgttccttgtcttaatgatgcacgttgcatgatgatagcatcaaatacaacattttcattaggttcgatagcccagattgagtcgtttaattcaacgttcccattttggctaccatcttgtttaaataatgttacgtttgccattggtaaaatcctcccttctcagattatttatgagctttaacggctgttttaattgtaaccattgagtttttagcgcctggtacgttacctttaacaagaataacgttcttttcaacgtctgtacttacaaccacaaggttttgaacagtacgttggttgttacccatgcgtccaggtaataatttacccttgaagacacggttgataacagcacccattgaaccaggacgacggtggtaacgagaaccgtgacccataggcccacgtgattgtccgtcttttttaatgttaccttggaaaccatgacctttcgttacaccagtaacgtcaacgacgtcgccggctgcgaaagtatcaactttgatttctgttcctacttcgtaatctcctaatgcgacatctctgaattctctaatgaagcgcttaggagtagtgtttgcttttgctacatgacctttagcaggtttgtttgacaagacttcgcgtttatcttcaaaaccgacttggatggcttcatagccgtctgtttcgtttgttttaacttgtaaaacaacgtttggagttgctgcgataactgttacgggaattaattcaccgttttcagtaaagacttgtgtcatacctacttttctacctaagattccttttgtggtcatggtaacacctcttttcaattattttttatttggataatgctaattaaagcttgatttcgatgtcaacgccactaggtaagtcaagtttcatcaatgaatcaactgtcttaggtgttgggttaacaatatcgattaaacgtttgtgagtacgcatttcaaattgttcacgtgaatccttgtgcttatgtggtgaacgtagaactgtgtataaagttctttcagttggtaatgggattggaccagagattgaagctcctgttctctttgctgtttccacaatcttatcagctgattgatctaaaatacggtgttcgaatgccttcaaacgaatacgaattttttgttttgccatgtttttccctccttcgtctattttaaaagtagactagctccgtgaaaatttttccggcacgcccgcccatggcaaagcggccgggtgtgtcgcaacctctcacatcttagctactcggggtatcttgcgacccccatgtgtgcaaacctctgctatagaaatagcaccttatatatcttacaagatagagcgcgataacgcaaccccttttttgctgatttatcaaagtttttcatgacattttcattacaaaaacgtcaacagcatgttagtagccttttccatcggttttcgttaaactaaagttaatttcaaacctcaggaggcctcttccaatggataaagctgcgttattgatcatcgactacacgaatgacttcgtcgccccagacggtgccttaacggctggtaagccggctcaagacatcgcatctaccattgtaacacttgcggaccaattcttggccaaaaaacagtttattattttaccaactgacttacatgttgcaaacgaccctttccatccagaagctaaactcttttcgcctcacaacctcgtggatagccgtggacgcgctttttatggtccactagctaattggtatgccgaacaccaagacagcccctacgtctacgcattcgccaagaatcgctactctgcgtttgcgaacactaatcttgataacttcttacgcgaacggcagattaccgatttgcatttaactggtgtctgcaccgacatttgcgtgctgcacacagccgtttcggcttataacctgaattatcccctgacgatccacaaaaaagccgtcgccaccttcacgccaaacggtcaggaatgggcgctggcacatttcaaaaacagtttaggcgcaacaatcatttagcacttttcttctataaaatataaaagccaccgccaattcaaaattggcggtggctttctttgtttgttatgtttcgaaaaaaacgctaaaaaatgttatgccagggcggtggcaatcgagttagtaggagttgaacctacatcaaccatcttattcggatcaccttaatatcgttgcgccgttttaatcgtgccttcgaaagcaattaaacacaggtctccaacttaatactaagtgagccgactcgattttcttgggaggaatttcaaatgatggttcgttctaccgattgaactataactcattggtgttgcttgcgatagttaattctttctagggagagctaccacacaaaattaacaaaatcagatgattcttgggaggaatttatctgatatataaagaataacaattagttgtgaacaaaatgtgaacattcaattatgaaactgtaaaagaatgacatcgctcacaactaaaaaaccgagttgcctttgacagcaacccagtcacaaaaaacgatattaagcaattaatgcggtcaaacgaccgttctgacgaacgattcgcttattggccaccgttcttcttaatgatttcttcttggatgctcttaggaacagctgagtagtggtcaaataccattgtaaatgtcccacgaccttgtgtagctgaacgtaatgttgtagcataaccaaacatttctgacaatggaaccattgcattaacgatttgggcattaccacgtgcttccataccttcaacagcaccacgacgagcagttacttgtcccatgatatcgccaagatattcttcaggagcaataacttcaaccttcatgataggttcaaggatttcagcgccagcttgtttagcagcgttcttcaatgccattgatgcagcgatcttaaatgctgattcattagaatcgacatcatgataactaccatcatataacttagctttaacgtcaatcaatgggtaaccagctaagacaccgtttgccattgattctttcaagccttgttcaactgatgggatgtattcacgaggaacaacaccaccgacgatagcgtcttcgaattcgaagcctttaccttcttcattaggtgtaaattcaacccaaacgtcaccatattgacctttaccaccggattgacgaacgaatttaccttgtgcagatgcttgttttgtgaatgtttcacggtaagcaacttgaggttcaccaattttggcaaccactttaaattcacgtctcatacgatcaaccatgatatccaaatgcaattcacccataccagaaataagcgtttcgcctgtttcattgttggtttcagccttgaatgtaggatcttcttcagcaagtttttgtaaagcaagatctaacttatcacgatcttcttttgattcaggttcaacagaaacttggataactgggtcagggaattccattgattccaagattaatggatgatcaacgtcagtcaatgaatcaccagttgttgtattcttcaaaccgattgcagcagcgatatccccagagaatacttcaggaatttcgttacggtgatttgaatgcatttgtaataaacgaccaacacgttcacgtttgtctttagttgcattcaagatgtatgaaccagattgtaatgtaccagtataaacacggaagaatgttaaacgaccaacgaatgggtcagtagcaatcttaaatgctaaaccagcaaatggtttgtcatcgccagccatcaattcaacttctgaatcgtcttctgggtttttagcgttgtaaggacgtacgtctaatggtgatggtaggtaatctacaacaccatccattaacatttgaacacccttgtttttgaaagctgaaccagcgaaaactgggaagaatttcaaatcgatagttgcttgacggatagcagctttcaattcttctttagaaatttcttcgccttctaagtatttgtccataatgtcgtcattaacatcagcaacagcttcaactaattcggcacgacgttttgtagcttgttctaggtagtcagcaggtacgtcaactgtatcccacttagcgcctaattcatcttcgtcatagatatcagcttgcatttcgatcaaatcaataacgccttggaattcatcttcagcgccaattggcatttgaacggcatgtgcgttagcttgtaggcgatcttccaatgttgtcattgaataatcaaagttagcgccaagtttgtccatcttattaacgaaaacaatacgaggtacaccataagtagtagcttgacgccaaacattttcagtttgaggttcaacccctgattgagcatctaagacagtgatagcaccatctaaaacacgcaatgaacgttcaacttcgattgtgaaatcaacgtgacctggtgtatcaatgatatttactcgattacctttccattcagcagttgtagcagctgatgtgattgtaatcccacgttcttgttcttgttccatccaatccatttgtgaagcaccttcatgtgtttcaccaatcttatggattttaccagtatagtacaagatacgttctgtagtagttgttttaccagcatcaatatgtgccatgataccaatattacgcgttttgtctaacggaaattcacgtttgtttgccataagtgaatgttactcctctcgaatattaacctaaagacaacaagaggccattatatgattttttaaaaaacatacaatagccaaccttgataatcttaccagcgataatgtgcaaatgcgcggttggcatcagccattttatgtgtatcttcacgtttcttaacagcagcaccagtgttgttggcagcatccatgatttcacgtgcaagacgttgatccatagtatgttccccacgtaggcgagcgtagcttactaaccagcgtaaacctaaagttgtacgacgttctggacgaacttcaattggcacttggtagttagaaccaccgatacggcgagctttaacttcaagtactggcatgatgttgttcatagcttcttcgaacacttctaatggttcattaccagtttcttctttaataatatcaaatgcgtcatataagattgttgacgctgtaccacgtttaccatcaatcattaagcggttgattaagcgtgaaaccaatttagaattgtacattggatcaggtaaaacgtcacgttttgcaacatagccttttcttggcatcctgataacctcctcaagatatttaagtccttgaagtaacacacagtgtcatttaaacttcaatcgactttttcaaatttttttgtgtgttattttttaggtctcttagtaccatatttagaacggctttgcatacgaccgtcaacgccggctgtatctaaagcaccacgaataacgtgataacgaaccccaggtaaatccttaacacggcccccacggataagaacaacactatgttcttgtaggttatgaccaataccaggaatataagctgtgacttcgattaagttagataagcgcacacgagcatacttacgtaaagcagagttaggctttttaggtgtcatagtaccgacacgagtagcgaccccacgtttttgtggtgctggattatctgtagcttttttcttcatactattgtagccaaagtttaatgcaggtgcatcagactttgaagttcttgatttacgacccttacgtaccaattggttaattgttggcatttgaaggttcctccttccttgatctgaaagttatttttaagttttaagtccacacatccaggtggttctttttttgtgataaaaaaatggcaacctagattgcgcgaattgtgatgcatttttagacgtcagtcagcatgtctgttatccagaaaacctccgtaaaaagcacatctataagaatagcatgcaaaaaatcgaaagtcaactcgatttcggctacttttctgaaaaaagcaacgtccttttaccgtagtttaagagtaaggaggattcacttatgttactttatttaatcatcttttatagcggtgcttgttgcgcctcatttctaaccgtttgcgcctggcgcttacccatcgaaaagtccattatcacaccacgttcgcactgcgattgctgtcagcaaccactggcttggtatgatttattaccactattcagctacttatacttacatggccactgccgcacttgtcatgctcagattaagcccacttttttattcagcgaactaattggtggtctattggcctgcttcatttttagcgaatccctttcttgggacctcgcttatttactcgtgattcttttttacatcagtctcgttgacctcttctactatattctctatccaatccccttattcgcatcactggcgcccctcttctatttgtattggccacagaatcattggctaggagccatcgtcttttgttgcgggctgttgctcaccacttactgggcgtctggttttggttttggcgatgtcgagttactcactatcctaacgttgtgggtcggccttgaatccgttttgcgaattctcttagcagcctgtttaatctgtattctatttcaaggcatcaaaaaaatctggccatcgcctaaacaagcgacgcgccagattccttttattccctatatatcgatgggagtggtgataatactcctacaaacaccacaataatgattatttcttttccaaaaacgatgccgtagacatcacttgccccattctcgggaaaatatattgcaagctgtgttggtgttcaatcgccgtgctggcggtcattgcatcttcaatgaagatttggtgatagttatgttcaaacgcatcacgcgccgttgattctacgccaatatttgtagaaatcccacataagacgatggtttcaatccctcttctacgtaattgaaggtctaagtcggtgccgtagaaggctccccattggcgttttgtaatttgatgcgcatttttgaagttcgcaatttctgctaataaacgtgtgttcagtagcggtgatggttggcgatagtcaggtgtccgttcacctaaattaggcgttagttgatcttggccatctgtgacgccaacatttacgaggacaacaaaaccttggtgcgcttcaaagtcttcgattagttgtcgggcgttttgaacgaccttttcccctgaatgaggtgcgagcgttgggcgatccgcaatgcccggttgtaaatcaatcaccactagggctgttttggcataatcaatggttgtcatctgaaagctccttttaatttggtagacaaaaagaggccccaagggacctctttttaacgtgcatttaaaggcatattcctgtgcctagcgctgtccgtcgaataagcgactgtgtcgcttattcaccagactatgctagtgctcggaatataatcgcctttaattgcacttctttattcttttgtttcttcttgtttcatttgtgcttcaatgtcactgattgagtaaacattttctgatacagcaccgactgtcttaggttccatatgacgatacttcgccataccagtaccagctgggacaatcttaccaatgataacattttctttcaaaccaagtaatggatcgctcttaccgcggatagaagcatccgttaagacacgagttgtttcttggaatgatgcggctgataagaaactatttgtttccaatgatgctttagtaataccaagcaagacaggacgacaagtagcaggtacgccaccgctaattaaggtatcgtggttacggtctgtaaattcactaatatccattaatgtaccaggtaagatttctgtatcacctgggtccatgacacggactttacgtaacatttgacggaccataacttcaacgtgtttatcgccgatttcaataccttgcatacggtaaactttttgtacttcatgcaagagatagttttcagttgataacacatcgcgaactttaattaattgcttaggatcgacagaaccaccagtgattttttcaccacgatgaatcatgtcgccttcgctaacaatgatgtttgacgtataaggcacgctgtatgaacgtgtatcagtttcgccttgaaccgtaatttcacgtgtgtgttctgctgggttttcttcaaccgcaacaacttcacccgttacttcagtgatagtagcgatagctttaggattacgtgcttcaaaaatttcttggatacgaggcaacccttgagtgatatcttcaccaccagcaaccccaccagtatggaagttacgcattgttaattgcgtaccaggttcaccgattgattgggcagcaacagtaccaactgcttcgccaacttcaacttcttcgccgttagccatgttacgaccgtaacatttcttgcagacaccgtgttttgtgttacatgtgaagacggaacgaattgtcacttcttcaacaccagcatcaacaacagcttgagcaagctgttcatccatcaattggttcttagcaatcattacttcaccggttgttgggttaacaatcgtcttcattgcacaacggccgacaagacggtcatacaatggttcgatcatttcattaccttcacgaagtgagtgaataagaagaccacgatcagtaccacaatcttcttcacgaatgataacatcttgtgcaacatcaactaaacgacgtgttaagtaaccagaatcggcagtcttaagagccgtatcagtcatccctttacgggcaccatgggtagacataaacatttccatgacagagaggccttcacggaagtttgatgtaacaggaacttccatcatcccaccattaggagcggccatcaagccacgcataccagcaagttgcgtaaagttagagatattaccacgggcaccagaatcagacatcattgagattgggttcgttggatcaaatgaatccgttaaacgttgttggatatcatctttagcatcgttccaaatttcaataacacgcgcatggcgttcttcatctgtgatcaaaccgcgacggaattgtttagaaatcgttgtaactttcttatgagcgtcatcaacaatttcttgtttttcaggtaattgcggcacatcggcaaccccaactgttaaaccagcatgagtcgcttgaacgtaacctaaggtcttcatgtcatccaataaatcagatgtccgttgaaccttatataccttgaagacttgcgcaatgatatcacttaagaaacctttcttaaatggtaagattacgggtgcaccagtcaagtaatcatgaatatcttcaccgttgtcgatgaaatacttgtcaggaacaccattcattaagttatctgttgttggttcatttaaatatgggaagtcagctggcatgatttcgttgaacatcactttaccaacactcgttaccataatcttgtgacgttgatcatctgtaaatggacggttagccatatcagcaactgataaaccaatccgactgtgcaaatgaacgtggccagtttgataagccatcaagacttcgtttgtatctttgaagatcatgccttcgccgagacgatttttttgttcaagggttaagtagtagttccctaaaacaacatcttgagatggtgtaacgattggcttaccatctttaggtgccaagatatgatgagcggcaagcattaacattcttgcttctgcttgtgcttcgtcagataaaggtacgtggatagccatttggtccccatcaaaatcggcattgtaagcttcacaagctaatgggtgaagacggattgatttaccgtcaaccaagattggttcgaaggcttgaataccaagtctatgcaatgtaggtgctcggttcaatagaactgggcgttccttgatcacatcttctaaaacgtcccaaacatcgtcgtcttgacgatcaattttacgtttagcgttcttgatatttgaagccatatcgcgtttaaccaattcgtgcatcacaaatggtttgaacaattcaagtgccatttcacgtggtaatccacattgatagaacttcaatgtagggccaacatcgataactgaacgaccagaataatcgacacgtttaccaagtaagttttgacggaaacgaccttgtttccctttcaacatgtgtgaaagtgacttcaatggacggttaccaggtccagtaactggacggccacgacgaccattatcaatcaaagcatcaacggcttcttgaagcatccgtttttcgttttgaacgatgatgtttggtgccattaagtctaacaagcgtttcaaacggttgttacggttaataacccgacgatacaaatcattcaaatcagaagttgcaaaacggccaccttcaagttgaaccatcggacgtaaatccggtggaataactggaatagcatccattaccatccagtcaggacggttacctgacttacggaaggcatctaagatgtctaaacgacggatagcacgtgttctcttttggccttgagctgacttcaagttttccttcaattcagcgacttcgccttcaagatcaacgtcttgtaacaattctttaatggcttcagcacccattttggcgttgaatttgttgccatattcatctaatttttcacggtattcgcgttctgtcatcaattgtttcttttcaagtgctgtatcacctgggtcgataacaacgtatgatgcgaagtaaataacttcttccaaagcacgagggctcatgtctaagacaagacccattcgactaggaatacccttgaaataccagatatgtgtaacaggcgctgctaattcaatgtgacccatgcgttcgcgacgaacttttgaacgtgtaacttcaacgccacaacggtcacagacgattcctttataacgaatccgtttgtacttaccacaagcacattcccaatcttttgtagggccaaagattctttcatcaaaaaggccatcgcgttcaggttttaaggtacggtaattgattgtttctggctttttaacttcaccatatgaccaactacggattttgtctgaagatgctaaaccaatttgcatgctttcaaacttattgacatctatcaaagggcgacctcctcattatttgtaagatagtcaagtgttttacgcactctactaatccgatatcaaacgcttattctgctgatggatcttctgcacttgctgcttgtgctttttcagcttcttgttgcgctttcttttcttcttgttcttttgcgtatttagataaggcatcaacgttaacaacatcgtcatcatcgtcatccatatcgcgcaattcaatttcttgattatcgatatctaagactttcatgtctaaaccaagtgattgtaattctttaaccaatactcggaatgattccggtacaccaggttttggaattggttcacccttaacgattgcttcgtatgtcttcacacgaccaacaacgtcatcagacttgtaagttaagatttcttgtaaggtataagcggcaccgtaagcttcaagggcccaaacttccatttcaccgaaacgttggccaccaaattgtgctttaccacccaatggttgttgcgtaacaagtgagtatggtccgattgaacgggcatgaagtttatcgtcaaccatgtgggctagtttcatgtagtacatgacaccaactgacacacgtgtatcgaatggttcaccggtccgaccatcataaagaatgctcttaccatcagaaggcatgtttgcttcacgaacagcatcccataaatctttatcttgcgcaccatcaaagacaggtgttgcaacatggatacctaagtttctagcagccatcccaagatgtaattcaagcacttgtccgatattcatacgagaaggcacacccatgggactcaataagatatccactggggtaccatctggcatgtatggcatatcttcttcaggaacaacgattgaaacagtccctttgttaccatgacgtccagccatcttatcgccgacttggatcttacgtttttgtgtaatgtaaacacgaaccatcatgttaacacctggtgataattcatcgccagcttcacgcgtaaagatcttaacgtcttggataataccgccgccaccatgaggtactttcaatgatgtatcgcgaacttcgcgggctttttcaccgaagatagcatgcaatagacgttcttcagctgataattctgtcacacccttaggcgttaccttaccaactaaaatgtcgccgtctttaacttctgcaccaacacggacaatcccgaattcgtcaagatccttcaatgaatcttcaccaacgttaggaatttcacgtgtgatttcttcaggtccaagttttgtatcacgtgcttctgattcgtattcttcaatatgaattgatgtatacaaatcttctttaactaagcgttctgaaagaacgatagcatcttcgtagttatacatattccaagtcatgaaagcgatcaatgggttttgacctaaggctaattcgcctttttccatagctggtccatcagcgataatttcatcaacatcaacgtgatcgccttttgcaacgattgggcgttggttgtagtttttaccagcatttgaacgacggaatttcattaattcgtacgtatctaatgagctgtcttcacgacgaacacgaatagctttcgcatcgacatattcaacagttccggcatgttgtgctaataaagcaatccctgaatcgtgggctgctttgtattccatcccagtcccaacaagtggtgcatgtgggttaaccaaaggaacagcttgacgttgcatgttagcacccatcaaggcacggtttgaatcatcgttttccaagaaaggaatgcaggccgtagcgacagcaactacttgcttaggcgaaacgtccatgtaatctaacttgtcgattgatgtttcgatattgtcatccttgtaacgggccaagaccgtgttatcaacgaatgaaccatcatcgtttaatggtgagttggcttgcgcaatgacatagttatcttcttcgtcggctgttaaatagtcgatcttatcagtaacatcatgtgtatcccaactaacacgacgatatggtgtttcaatgaagccataacggttaacaacagcgtagctagctaaactattaatcaaaccgatattagggccttcaggtgtttcgattgggcacatacgaccataatgcgtatagtgaacatctcgaacttcataaccggcacggtcacgagtcaaaccaccaggtcctaaggcagatagacgacgtttatgcgtcaattcgccaagcgggttggtttgatccatgaattgtgacaattgtgatgaaccgaagaattccttgattgaagcaacaactggacggatattgatcaattgttgtggtgttacggtgcttgtgtcttggattgacatccgttcacgaaccacacgttccatccgtgataaaccgatccggaattggttttgtaataattcaccaactgaacggatccgacggttacctaaatgatcaatatcatccgttgaacctaaaccttcttgtaagttaaagaagtagttcattgaagcgatgatatcagcaggaatcacatgttttactttagcatcgatatgaccattaccaattaagttaatttctttatcaggtgtcttttgtgagtaaactttaatgacttggagtgtcattggttcaggcaagacgccttcgtcagaaggttggtaagtaacagctttgaagtcttcttgatctaaataaggtgccaaggcatccatcacttgacgatcaacaagtgtatctttagcagcaattacttcgcctgtgtcaggatcagccaatgtttcagccaatgtttgacccaataaacgtgtcttcaagcttaatttcttattgatcttgtaacgaccaacagaagctaaatcgtaacgtttagcatcgaagaaacgggcaaaaagtaatgaacgtgagctatcagctgtcttaggttcgcctgggcgaagtctttcatagacatctttcaaagcttcttccgttcttgagtcgtcagtattcttatggatatctttttctaacgtcaacattaatgaatcgttgtcgcccaagatatcgataatttcttgatcagacccgtaacctaaagcacgtactaaaacagacattggaatcttacgtgtccgatcaatacgaacgtatgcaatatccttagcatctgtttcaaattctaaccaagcaccccggttagggatgacagttgtgccgtaagttgtccggctatttttatcaatagcactgttgaaataaacaccaggtgaacgtactaattgagaaacgataacacgttctgcaccattaataatgaaagtcccttggtctgtcatcaatgggaagtccccaaagaagacgtcttgagatttaatttcaccagtttcatggtttgttaatttcaaagtaacgtgtaatggtgctgaatagttggcatcatgttgtcttgcttcttcgaccgtatatttaggttcaagaagttgataatcaacgaattctaatgataagttaccagcaaaatcgtcgattggcatgatgtcatcaaacatttcacgaagcccttcgtctaaaaaccattgataggaattagattggatttcgatcaagtttggtagttccaacacttctttaatccgtgcatagcttctacgtgtccgatgtttaccgtaattgactaagtgtcctgccaaattgttcacccctctataagttttccgcagtacttaatgttacaaaaatgtgacaaagattaagaaaagattacattgccatattttcgactttttaagcagaaaaaaaacaaaaatagttgatttgcttgattaaaatcagcctcactatttttgttttccatgaataccgtgctggacaatagatcagcacaataaatttttctacggattttcgcagttacttgataatataccttatttcctataaaaagtcaatcactgacgctcgtcgaaataggccaatgctttgcccccataaaccgtaccaggaccacccgacatcataactgctgtgttgatcgtttcgatcacttcatcccgactaacgccttctttaatgaggcgattcatatgactgagtatgcagccttcacaccgagtcgcaatcgcaatccccaatgcaatcaattctttttccttcaccgttaaggcaccatctttgacgttagccttgtgcaagtcaccaaacgcccccatcacttcgggcgacgcttctttgagtgccgcgtattccttcttaccggtttgtgcctgttctgaataagtcatctgaatacctccttgttttaataactctactataacaaagaaaccgtttttagcagtctgatatgcatttttacaatttcatcacattacttttaccatctttacagtaattacgggtcaatctttacactggctcgctatacttttgtttgtaccttaattcaggctgggaggcttaattatgaagagaataagcacagtattactatcgatcggcactatcgccctcttattagcgggttgtcaaggcaaacaagcaagtcaaggtgattctaaagcacagtcggctaaaatcacagcggttggatcaacggcactgcaaccccttgttgaacaagctggggcaacttatcaaacaaaacacgctggcatcgatatcactgttcaaggtggcggttccgggaccggccttgcacaagtcagcgatggtagtgtcacaatcggtaactctgacatctttgcggaagaaaaagccggtatcaacgctaagaaacttgttgatcacaaggtcgcagtcgtcgcaattgcccccgtcgtgaacgaaaaactcggtatcaaatcattaacacaggcacaactaaaagacatcttcactggtaaaattaagaactggcacgcagttggcggccctgaccaatcaattaccgtcgttaaccgcgcacaaggtagcggcacacgccaaactttcgaaaatctcggtcttaaaacgaataaagtcatggccagccaagaacaagactcatctggtactgttcaaaaaatcgtgcgtcaaacacctggggccattagttaccttgcctttccttatattaaggatggtttgaaagctgtcgcacttgataacgttcaaccaaccactaaaaacgtcctcacgaaccaatggcctatctggtcttacgaacacgcttatacaaagggtgcgcctaattaccaaacggctaaatttatccattaccttcaatctaaagacgttcaaaaaacacttgtgccaaaactcggttacattccaatgactcagatgaaagtggaacgacatgctgatggtagcatccaagacgttaaataacgcttctaaaaagacggctaatcttagccgtctttttatattggtatagacaaaaatattaagctaaataataaacttaacattcaatcgtaaaattggtataatttaaactatcagtttatggaggagtcttattcatgataaacaataaaatgaaaacgctatccgataaatacccaacaaaaatggccgtcacttctgaaatcatcaatctcaaggccatcttaaacttgcctaaaccgaccgaggcctttatgagcgacctccacggtgaatacgatgccttccagcatcttattcggaccggcgctggtaacttacgccaaaaaatcaatgaactcttctctggtgagatgacccccgagacgatgcaggccttcgcttttctcgtctactatccaactgaacgattggcgctcaaacaccaggccctctcagagaatgaattaaatcagtggtacctgacgacttttaaacggatgattgacctgcttaaattcgtttcaacaaaatacacacgttctaaagtccgtaaagcgatggcccccgacttcgtctacattaccgaagaattaatgtacggcgatgtcgccaacgttgataaaaagcgttacttccaagaaattaccgcgaccattattgaattaggccaagccgacgcgttaattatcgccacaagtcacacaattcagcgcctcgttgttgaccaatggcacatcatcggtgatatttacgaccggggccctcatcccgatttgattgttgaccagttaacccaattgcctgcggtcgatgtccaatgggggaatcacgatattttatggttcggtgcagccagtggttctgaactctgtttactaaacttattgcgaatttgtgcccgttataataacctcgcaatcattgaagaaacctacgggattgatttaagcaacttggtccgttttgcggcccaacactatcaggccaatcccgccttcatgccggttgaagatcccaaccaaggcccgctgacacgtgcggaaaaactaaaaattagccaggtccaacaagctttggctatcatgcaattcaaactcgagttaacggtgattaaacgccatcccgaattcaacatggatcaccggctcctattgtcgcaagtcgattttaaacgccgcatcttgcacctcaacggacaggaatacccactagaaaacacctgtttccaactggttgatcccgagaaccccgaagctttaacggcggaagaaagccaaatcatcgcggatttactggccgccttcacgcgctgtcagaagttacgcaaacacctgacctttttaattgatcacggtagtatgtaccgcatttacaatcaaaacttactcttccacggctgcttgcccgtcgatgctgaagggcacttcctgacattgaccctcgctaatcaacactatgccggcaaacagttactcgatttcttcgatcagcaaattcgctcgagctttaaccaccccttacaccaagcaaacctctcgacggatttattgtggtatctatggacggggccgttgtcaccactctttggtaaaaacgcgatgacgacctttgaacgttacttctgcccagatcccgaaacccacgttgaaactaagaacgcctattacagtttgcgtcacgacgctgattttattcagcagctccttagcgaattcaacctttctcctgaaactggccatatcctaaacggccacacgccggttaaaaaaggccacgaccccattatggccaaccgccaaatgattgtgatcgatggtggcttttcaaaagcttaccaccacacaactggtatcggtggctttaccttactctataattcttacgggatgcagctggtgacccaccaacccttcaccaccaaggcggatgcgattgctaatatgaaagacatcatctcaacacggcgagtcatcgaccaagttagccaacgccaacgagtgagtcaaaccaatatcggcgcagccatcaaaaccgaaatcgaacaactccaaacattactaacgattcaaccggatcattaataacactaaaaaaacgccccgacaaaatcaatttgtctgggcgctttttaatgttgctggtactcacttttatttaacagttgttttttcttttttactattaatggtaatttcacctttggtagccccaattgtcactggtgtatcagtcgtgatttcaccagccaataaggcttcactcaagcgatcttcaacttgcgtttgtaatacacggcgaattgggcgcgcaccgtattctggatcaaagccggctttagccacaacatccatcgctgcagcagtcatcttgatcttgacaccttgttccgctaagcggtttaagatgcctttggacataatcttgacgatttcacgcaattcaggttgtgttaatgaatggaagaccaccgtttcgtcgattcggtttaagaattctgggcggaatgacttcttcaattcttccaaaatccgaccttgcattgctttgtaatcggcagtgacatctttgaccccaaaaccaactgacttgtcatcacgtaaggctgttgcccctaagttagacgtcatgatcatgattgtattccggaaatcaactttccgacccttagaatctgtcaaataaccatcatctaagacttgtaacaggatattgaagacgtctggatgagccttttcaacttcatcaaaaagaacaacggaataaggtttattgcggactttttcagttaattggccaccttcgtcataaccgacgtaaccaggtgctgccccgactaaacgactcgtactgtaacgttccatgtattctgacatatcaacccgaatcaagttgtcttcagacccaaacatggcttctgccaatgctttggccaattcggtcttcccaaccccagtagggcctaagaacataaatgaaccgattgggcgcttaggatccttcaaaccactgcgggcccgacgaattgcacgggccacagctgaaatcgcttcttcttggccaacaacgcgttcatgcaagactttttcaagttgcaacaagcgttcgctttctttacgttgcaattgagtgactggcacacccgtccattgggcaacgacttgtgcgatatcttctggttggacttgaatatctgtccggacaccattttcttgttcggctgcttggcgcttagccattttagccttagcaataatttctttttcgtgaatggcagcggctttttcaaagtcttgtgcaccaactgcgacttctttttctttcgccaacgattgcaattcagtttctaagcgatcgattggtgatttttggttaacagcatctaatctgacctttgcagccgcctcatccatcaaatcaattgccttatcaggtaagaaacggtttgtgatataacggttcgctaaaataacggcttcgtgtaatgcttcatcagaaattgtgatgccgtgatgttcttcataacgtggtcgtaacccgtgtaagatttgttccgcatcttctggtgttggttcatcaaccgtcaccgtcgcgaaacgccgttctaaggctgcatctttttcgatgtatttttggtattcatcaagcgttgttgcaccgattaattgcaattcgccacgggcgagggcgggtttcaagatgtttgaggcgtcaattgcgccttctgccccaccagcaccaattaaggtatgcaattcatcgataaagaggattacttggccatcttcatggatttcttcaataatcttcttgagacgatcttcaaattccccacgatacttagtgccagcgactaatgagcccatatcaagcatcattaaccgtttttgttgcatgtcgcttggcacatcaccgttgataatccgttgggcaaagccttcagcaatcgccgttttaccgacaccgggttcgccaattaaaactggattatttttagatcgacgcgctaagatttgcacgagtcgtttaacttctgaatcacgaccaacgactggatcaatttgattttcgcgggccatttgggttaaatcgcgtgccaattgattcaaagtaggcgtgccttcttgatcaacctttttagcactggctttagcgcgtttcttagcagttgcagcatcaatccccatcttttggagtaataattgacgtgttttggctaaactgaggcctaagtttaatagaatacgggccgcaataatgtcatcatcgcgtaataacgctaataataggtgtgccgtcccgattttaactgagttagcttgttgtgattcaacgcgcgctaaatccagcacttgtttggctttaggtgagtatggcaaatagccgcccacacccatggcaacgattgaatcaccataaccggttaagcgttcaatttcttccaagacatcagtgggtgtcacaccgagttcacgtagtgcgttcccagcaatcccttcgctttcgaggacgagcgctaataacagatgttccgtccctaatgcatgatgattaaacttcttagcttgttcttgcgctaacattaaaacgtttttggcacttggtgtaaatagattattcatggataatcccccactctttacttaatttcgtaacgtaatctttctaagacagcaattagcattcgtgcgcgtaattgctcttctaactgcttatcattgacggctaatgtctgcgcatttagcattgctaataccaaattcccctctttttgcgataaaatctgctcatcatagagtttttggataatagctaatgtatcggcttgcgagattcgatcctcaacactaccaatcaacgcttctaaaaagtcgcgatcatctaagaattgaaccttaacgatgcgaatgtagccgcccccgccacgcttactattgacgacataccctcgttgttctgtaaaccgagtattaatcacatagttgatttgtgacgggacacagttaaatagtttagcaatttcggagcgtcgaatttcaatctgctcgctgtcagccaatattttttttaaataggcttcaataatatccgagatattctgactttgcaaatagatcaatccctttttttcattcttcagcgcttataattcagtctaaaaatttaactttgactaacgttgactattattataacgattattcgttcaaaaggaaagtttgaagaactgcacaaaaaaagacttgttcgacaacaagtctttgagagtcgggaaaacaagatttgaacttgcggcccctacgccccgaacgtagtgctctaccaaactgagctacttcccggagagttatttaattatttacgggtacaaaaaaagcggaagacgggattcgaacccgcgacccccaccatggcaaggtgatgttctaccactgaactacttccgcattttttattaactttttgtatccagttaaggaggattgttcaattggtaataatagatgtttatgggaaaataacaaaaataaaattgtcagataaattgaaactatatatatctaatgtttctgatgactggaaggaaagcattatagaagacatgttacaagaaattcgacaacaaaaagttgacatggcagataatttgaaaaggtatggtaaaacatttcaaacagaatattctatatcttatttgaaagaaatcgttcacgccaatgttgaagactatacaaaatataatttagattctattgagtcatgtcttcaatgccttgttgataatatgatatgtctattctttgactatgaatatcaggatatgcctttttttgattggacaagcaattgctttgatggtcgtttttgtgaagaggattacgctgaaaaagtgatgtattttagtaactttgtaaatcatgatatacaaaatggtattcatatgaactgcatttatacaagtaatatgaatcctaaagagcatactaggatattatcaaatctaagttttagaattgattcaaactttaaagggtgcaggactacagacgactacattacggaacttaaaaaaatgggcaaccgaattgattctatactaaaatcggaaaacgattattacaaattagattatattatgaacgggatatatagtgataatagttataatcaaaatcattatttaaagacttttactttgttagaacttgtattattaaaaccaaatcagaatacaaatgaaattgacaaattactaataccttatcttgataagaaatatggagaggtttcgagtgaagtagcaaaattattaagacaaatgagaaataaaatcggacatggtgatttcaaaggttttaacgaaaaagcagaaaaattcgctcaaaaatttatgaaacactttcattttgactatacagaatacagtagattaaattgggtattacttcatacctgctgtcttttagatgatttactcagaataactatttttcaacaattaaaagtcacaaaataattattattttatagagcaatcacctattttgattgctctttttctatttttacggaaaggacgtgaagacatgaaaaaaataagaagttacaccagtatttggtcagtagaaaaagtgatttatgcaattaatgatttacaactcccttttcccataacctttacacaaatgacatggtttatcgtttctttgtttgtcgttataatctttggcagtttaccaccactttccttgattgacggagcactactcaaatacttagggattcccgttgtcctcacttggttcatgtgtcaaaaaacctttgacgggaagaaaccctatggatttttaaaatctattattacctatgctctacgccctaaaataacctatgctggcaaacaaatacgattaaataaagaaaaaatgaatgaatcaatcacgattgtaaggagtgaacaattaaatggcacaccccattaaatatatcgaagataatctcgtatttaatcatgatggcgaagtatttgcttattatgaattaattccctataattacagttttttaagttccgatgaaaaagttcaagttcatgataatttccgtcaattgattgcccaaaatcgtgatggtaagattcatgccctgcaactagcaaccgaatcaagtattcgagcgacacaggaacaatcgaaaaaagaaatcactggacgattaaaagagatagcttacgaaaaaatagatgaacagaccgaagcgttagtttctatgattggtgacaatcaagtggactatcgcttttttattggttttaaactcttgctgaatgaacaggaagtatcggtcaaaaatattggcaaagacattcaaaaagcatttgcggaattctttcatggcgtgaatcacaagttgatgggcgattttgtttctatgcctatgtcagaaatcgaacgcttttctaaaatggaacagttattagaaagtaaattatccagacgctttcacattcgcccattggggaaagatgattttgggtatatcattgcccacctttacggtcaaacagggattccttttgatgactacgactaccatttacccaaacgatatgaagataaaaaagtgttggtaaagaaatacgatattattaaacccactcgctgtttaatcgaagaaaagcaacgctacttacggatggaacaggaagatactaccacttatgtggcgtattttacgattaacagtatcgtcggcgaattggatttccccaatagtgagattttttattaccagcaacaacagttcactttcccgattgataccagcatgaatgttgaaattgttgctaataaaaaagctctgtctaccgttcgcaacaaaaagaaagaattgaaagacttggatagtcacgcatgggaaagcgacaatgaaaccagtaccaatgtggtggacgctttagaatctgtcgacgaattagaaaccaacctagaccaaaccaaagaatccatgtacaaactaagctatgtggtacgggtatcggcaaaaaatctggacgagttgaaacaacgttgtgatgaagtaaaagatttttatgatgatttgtctatcaaattagtacgaccttttggcgatatgctaggcttgcataatgaatttattccctcaagcaagcgatatatcaatgactatattcaatatgtcacgtcggattttttggctggtcttggtttcggagctacacaaatgcttggtgaaaattctggtatttacgtcggttacaatctcgatacaggcagaaatatttatctccaacccagccttgcaagtcaaggaattaaaggctctgtgacgaatgcgttagcgtctgcttttattggttcattaggtggcggaaaatcattctctaacaatatgctggtctattattcggtactctttggcggacaggcaatcattgtagacccaaaagctgaacgtggcaaatggaaagaaaccttacctgatattgcccatgaaatcaatatcgttaatctcacgagtgagaacgacaataaagggttacttgacccttatgtgatcttaaaactcccgaaagattcagaaagcctagccattgatattctcacgttcttaacaggcatttccagccgagatagcgagaagtttcctgtcctgcgtaaagcgattcggagtgtcactcaaagcgaacaacgagggttgttattggtgattgatgaattgcgaaaagaagatacacccatcagcaatagtattgctgaccatatcgaaagctttgtcgattatgattttgcccatctgttattcagtgatggcaatgtcacccaatccattagcttggaaaaacaactcaatattattcaagtggcagatttggtcttacccgattccaatagctcttttgaagaatacaccaccatggaattattaagtgtggcaatgctgattgtcattagtacctttgctttagactttatccactctgaccgttccatttttaaaattgttgaccttgatgaagcttggagttttttacaagtggcacaaggaaaagctctatctatgcgtttagttcgggcagggcgtgccatgaatgcaggggtctatttcgttactcaaaacgccgacgatttactagatgaaaagatgaagaataatattggcttgaaattcgcctttcgttccactgacctagtggaaatcaaaaagaccttagaattttttggcgtggacaaggaagatgaaaacaatcagaaacgcttacgtgaattagaaaatggacaatgtttagtttcagacatctatggtcgtgtaggggttatgcagtttcacccgatttttgaagagttgcttcatgcctttgataccagaccgcctgtgcgaaatgagggggaaaaatgacacaaaaacaaaagaaatttcttcactatagttggataacgctcctttgtgtgggcgttattttacttttattaggcacgctgggcaatgcagtacaagcaacaggcttagttgatgaaaccattgatacaagcaacgagtattccaagtatggtttaaatcattatcagcttgattattatgtggacaatagctggggctggctgccgtggaattggagtgacggcatagggcaatcagtgatgtatggactgtatgccattaccaatttcatttggacgatttctctttatctttccaacgccacaggctatttggtcaaagaagcctacgccttggatttcattagtcaaacgtctcaagcgattggtgagaacatgcagaccattgcagggattacaccgaatggcttttccagttcgggtttttatgtcggcttccttcttctttttattctgattgttggaatctacgttgcctatacaggactggtgaaacgagaaacgaccaaagctatacgagctgtgttaaattttgtggtggtgtttattctatcagcttcctttattgcgtatgctcccgattatattgcgaaaatcaatgatttttccaaagatgtgagcactgccagtttagatattgggacaaagattgtccttcccgatacggatagtcaaggcaaagacagtgtggatatgatacgtgatagcctattttctgttcaagtcaagcaaccgtggttattacttcaatatggctcaaccgatatagaaaccttaggtgaagaccgtgtggaaaagttattggctaccagtccagatacaaacaatggtgaagatagagaaaatgtagtgattgaagaaattgaagatcatgacaatacctatttaacactcccgaagaccatttcccgattaggaacggtcttctttttgtttgtattcaatattggtatctcgatttttgttttccttctaacaggaatcatgattttttcgcaagtgctatttattattttcgctatgtttttgccaatcagtttcctattaagtatgttgccgagttttgatggcatgggcaggcatgccattaccaagttatttaatgtgattatgacaagggctggtattaccttgattattaccgttgcctttagtatttccactatgctttattcgctgtcagcaagttctccctttttcatgattatgtttttacaaattgtgacctttgcagggatttattttaaactgggcgatttaatgagcctattctctttacaaagcaacgactctcaaaacatgggcagacaagtgtttcgcagacctcgtcaaatgatgaatcgacaaaccagaagatttcaacgcagtatgagtaagatttttcgtggaaaagcagggtcaacgaagcaaaagacaatgacaacaaagcagaatcaaaccaataaagctaaccatactcgtcaaaatgaacggactacaccaaagaaagaaacagcactttccaatgtgaaaaagcaacaaggcggtatcgggcaacgattaggtgaaaagacagcccatgtattggacacgaaaaatcgtctagtcaataaaagaaagcaggctaaacaacagatacaggcgacaccaacccatgtcaaatatgcccttcatcaaggaaaagagaatgtcactcataatgtaacagactttaaacaatctatggcagataccaaagctcaacgcaaacaacagcgtatgaaccagcaggagcaaaaacgaaagaacattgctcaaaagcgtttggagctggataaagcaaaagaaaaaagacgaaaagaaaacccatcatctcctgttcagaataaccagcagcatgttcgcaagcgtcagcaaaccgtcacgcctgttttgtcacaaaacactaaacgtgaaaatcatcagcgaccattgaaaaaagagcaaaaacaaaagacaccaccgaagcaattcaatcagaggaagctaaataaaagaacggataagcgaggacaacaaacatgaagctaaaaataacagtgatttgtagtgtggtcttctctctcttcttttttctcttattattcctagtcattttctttgcagatgatacggacagtggcgaaaacaacaaggattcttctatttcacaaggcggtgtgaccgtttcaccagaagtgttggcacaccgtccgttgattgaaaaatatggtaaggaatatgggattgaagactatgtttcttatatcttagccattatgcaagtggaatcgggcggtacagcagaagatgttatgcaaagttccgaatctttgggtttaccgcccaacagtttgagtaccgaagagtccatcaaacaaggggttaaatatttcagtgaattattaaccagtgcagaacaacaaggagtggatatagattctgttatccaatcttataattatggcggtggctttttaaattatgtgaggagtcatgggaaaaaatatacctatgaattagccgaacagttttctaaagagaagtcgggtggtcaaaaagcagactatcccaatcccatagccatacctgtgaatggtggttggcgatataactatggaaatcagttttatgttcagttggtttcacaatacctaaccgacacttccccaacagaatttgatgatgaaaccgtgcaagtcattatggacgaagccttgaaatacgaagggtttccctatgtctttggaggggcgtcgcctaccacctcttttgattgtagtggcttaatacaatgggtgtatgacaaagctggcatttctctccctcgtgtcgcccaagatcagtatgacgctacgcaagaaatctctatggaagaagcccaagcaggcgaccttatcttctttcattcaacctataatgcaggcacatatgtgactcatgtggcgatatatttagagggaaatcgcttttatcatgcaggcgacccaatcggttatggcgacttaagcagtcgttattggcaagaccatctgattggggctagacgtgttattcataactaagaaaggaatgaatcaaatgattataaaaatcgagcgaaaagaaaagaaggagaaaccaaagaaatctaaaaaaccgagcaagcaaagaaaagttccgatgattaaagttggcacgcataagaaattaacctttgttttatgggttttattgattggtagtgtcggatttggaatctataaaaattttactgccattgacactcatactgtccgtgaaacagaaatcattaaacagcagattgtcgataccaaccaagtagaaagttttgtgaaatcctttgcgaaagactacttttcgtggcaacaatcccaagaagccattgataaacgaaatgaaaaattgacccattatttgacggaagaattgcaggtattaaatgaagaaatgattcgtaaggatattcctactagttctagtgtgaacgatatacaggtgtggcaggtttctcaagtgaatgagaacacctttgaggtactgttttctgttgaacaagttattaccgaagacaaagacaaggaaactatatcgtctagctttcatgtggttgtccatatagatgaatcagataatatggttattatcaaaaatccgacaatgagtaagaaacctcaaaaatcggactaccaacccaaacagctagaaagtgaccatacagtagatacagaaacgatggacgaaatcactagctttttagaaacgttcttccagctctatcctaccgccacagaaaaagaattgacttactatgtaagtaatcatgtgttacctatgattaacaaggaatatgttttcgaggaattggtgaatcctatctttaccagaaaagataaccaagtaatcgtgaatgtcgctgtgaaatatttagatcaagaaacaaaggcaacccaaatctcgcaatttgagttgatattagaaaaacaagataattggaagattgtaaaataacaaatattggtacatgattacagatactttgtaatcatgtactctttttgataaaaaattggagattcctttataaatatgctcttacgtgctattatttaagtgactatttaaaaggagttaataaatatgcggcaaggtattcttaaataaactgtcaatttgatagcgggaacaaataattagatgtccttttttaggagggcttagttttttatgcccttttgggtttttgaatggaggaaaatcacatgaaaattattaatattggagttttagctcatgttgatgcaggaaaaactaccttaacagaaagcttattatataacagtggagcgattacagaattaggaagcgtggacaaaggtacaacgaggacggataatacgcttttagaacgtcagagaggaattacaattcagacaggaataacctcttttcagtgggaaaatacgaaggtgaacatcatagacacgccaggacatatggatttcttagcagaagtatatcgttcattatcagttttagatggggcaattctactgatttctgcaaaagatggcgtacaagcacaaactcgtatattatttcatgcacttaggaaaatggggattcccacaatcttttttatcaataagattgaccaaaatggaattgatttatcaacggtttatcaggatattaaagagaaactttctgccgaaattgtaatcaaacagaaggtagaactgtatcctaatatgtgtgtgacgaactttaccgaatctgaacaatgggatacggtaatagagggaaacgatgaccttttagagaaatatatgtccggtaaatcattagaagcattggaactcgaacaagaggaaagcataagatttcagaattgttctctgttccctctttatcatggaagtgcaaaaagtaatatagggattgataaccttatagaagttattactaataaattttattcatcaacacatcgaggtccgtctgaactttgcggaaatgttttcaaaattgaatatacaaaaaaaagacaacgtcttgcatatatacgcctttatagtggagtactacatttacgagattcggttagagtatcagaaaaagaaaaaataaaagttacagaaatgtatacttcaataaatggtgaattatgtaagattgatagagcttattctggagaaattgttattttgcaaaatgagtttttgaagttaaatagtgttcttggagatacaaaactattgccacagagaaaaaagattgaaaatccgcaccctctactacaaacaactgttgaaccgagtaaacctgaacagagagaaatgttgcttgatgcccttttggaaatctcagatagtgatccgcttctacgatattacgtggattctacgacacatgaaattatactttctttcttagggaaagtacaaatggaagtgattagtgcactgttgcaagaaaagtatcatgtggagatagaactaaaagagcctacagtcatttatatggagagaccgttaaaaaatgcagaatataccattcacatcgaagtgccgccaaatcctttctgggcttccattggtttatctgtatcaccgcttccgttgggaagtggaatgcagtatgagagctcggtttctcttggatacttaaatcaatcatttcaaaatgcagttatggaagggatacgctatggttgcgaacaaggattatatggttggaatgtgacggattgtaaaatctgttttaagtacggtttatactatagccctgttagtactccagcagattttcggatgcttactcctattgtactggagcaagcctttagaaaagctggaacagaattgttagagccatatcttagttttaaagtttatgcaccacaggaatatctttcacgggcatataacgatgctcccaaatattgtgcaaatatcgtaaatactcaactgaaaaataatgaggtcattattattggagaaattcctgctcgatgtattcaagattatcgcaatgatttaactttttttacaaatgggcttagtgtttgtttagcagagctaaaaggatatcaggttaccactggcgaacctgtttgccagacccgtcgtctaaatagtcggatagataaagtaagatatatgttcaataaaataacttagtgcgttttatgttgttatataaatatggtttcttattaaataagatgaaatattctttaatatagatttgaattaaagtggaaaggaggagattgttattataaactacaagtggatattgtgtcctatttgtggaaataaaacaagactacgaatacgagtggatactatacttaaaaatttccctttatactgccccaaatgtaagaacgaaactttaattaatgttcaaaaaatgaatataataacaatcaaagagccagacgccaagacgcagagccgataatttgagaaatgaaactctcatcttatcggctctttttgtttatctgaattttactgactagccttcaatatttcttgcttcattgataccttttgctagtgcttccattaaggatagttctttgtctgtaaagctatccatgtatttttctatctgtagccttcgagtgctttttatcaaattatctgtaggtaagaaaaattcatcaatagacacatggagtaatgatacaagatcataaagcacctgtgtacttgggtgttgccctttattttctatatttgttaaataacgtgggtcaatttcaatgattgttcctacttgttcacgggtgagaccacgttttattcgagcctctttaatcgctagaccaacggctctaaaatcgtatttatcttcttttttacgcataataaaccacctctatacattttactgttcctatccaagtggaaacaggtatagaaaaacgtgttatgtagtttgtgagttcttttaagagcgctattatgcttatgaatgtgataaatccaatctcaaatagaaaggtcgctgattttatttacccatacaactatataaaatttagttatgctgctaaaaagtagataaaattggcgactgaatggaggtcacagtcgccatgaaaaagatacgtcactatctaattctcttaattaggttcttatcaaaaaaacttacccacctacactagataaatatgaccatcaatgtggttttacaaatcgtatagacagaacaattgaagcacatgaacagagaaaacaatctgtttatgtgtttttttggctacttcgtgaatatcttttaagatttttcttcacttatgcaacaaatccccctttcgtgtcgggacttagtatgaagggagataaagaagtacatgccactccctttcacgacagaaagggggtgaaaaacatgaaaccatcttcttttcaagaaaccatagaaaatcagtttgactatatctgcaaacaagccattgaagatgaacggaaagattatttcaaacatctaagcagactgtccaaaaaagaagtttcattttctgaaatagataactaccttgtcacctctttttctacggttgatacgtatgtcactgattttcaactattcacattgtatggattaagaatcaatgttgaaagtgatttgttaagcgaagccttacgccaccttccagagaacaagcggaacatcattttacttcattattttatggatatgagtgatgtggaaattgcagaattactaaatgtaaatcgttcaacagtttatcgtcatcgaataagtggactagccatgattaaagaattcatgaaggagtgtaaagaatgaaaacagcctatccaagggttcccttccccctcattgtaaaggcgacagatggcgacgtggaagcaattaatcagattgttaaacattatcgagggtatacctcaaaacgttctttgcgtcgcatgacagacgaatatggcaattctcatatggttattgatgaaaccctacgtggcagaatggaaacaaaactcatcaccaagattttagcgttcgaaattaaataatctcattttttcgtggaagcgtgttgaaccgttccacgcttcccgatttgggaggtttgttattccatcaaagcctactgtatgttcagtatgttttgataggctaacaagccaaacgttctttgacaattgaataaagccaatcgaatacgtttcgataagaaaagagccaacgaactaacacgccatgatctatgaagatagcgagcgattcatgttaaaacttcgtaaacaatctttagcaggattgttgccatgactttcttatcgtgataatgatactcccgtatagccacagtccgagcgttagtagcgtcgcagacaatgggtacggctacatgaaaatcatgcaggggtgaaatgcccgtgagctttgctagagctgttcgattgctgggatattcttctcttgtcaatgtattatcataaaaatatttgatataattataggtgaatattggagttttcctagcctataatgggaaaggagtaataatgataacggtcacaaaaaaagatttagttgagctaggatatggaacttctttttcagcagacatcataaaaaaagcaaaagaattgatgattacaaaagggcatacctactatcaatctcgaaagttagatagagtccctcgtgaagctgttgaagaaattctaggaattcggttttcaaatgaaaacaggtctgagtagtttttgcacagtaaggagtaaaaactatggttaaagacccaataaaaaaagcaaagaatggaacctattattttcgtgcaaatctaggttatgattctaaaggaaaaaaaattcaaaaatatcgtagtggattcactactaaaaaagaagcaagagaagaatattcaaaactactactgatgaaaccagaagaattaagtgagaataaggataaaatgacgtttaatcattatatctttgaaatttttcttccatggtataagacacaggtaaagctcagaacatatgaaaatcgcttaccaactattaagaaacatttctcttattttgataaaatggctgtttccgatattgagcctattgatgtgcaaaattggcaactaaaattatcaaagaaatgtaagtcttcttatgtgagagctgttcaaggactattttcagttgctatggatcgagcaattgtccttgggataaccaccacaaatccatctaagattattggcaatgtgaaaaagcaaaagtctaaaattgaattttggacaaaagaagaatttgaaaaagtaatctctctaatttataaagaagattactatcaacactttttatttatctctctgtggtttttatttatgactggaatgcgaattggtgaagctactgccattcaatgggaagatattgattttgactctggagtactaaccatcaacaaaacactttattacaagaatcaatcggattatagatttgttgaaccaaaaacaaaggcgagtgttcgtcatattgtattagatgaatgtactctaaattatctatccgaatggaagaaagcacaacaaaatctaattcagacagactttgtaatgagctataacggtattcctacccaaaaacatacgctagcacatgctattgaacgctatgctaagctggctagtattcatcgaatcagaattcatggtttacggcattcgcatgcttccttgttaatcagtatgggagaaaacccactcatcattaaagaccgtttaggacatgaagatattgagacgactttaggaacgtatggacatctttatcctaacagtaattttgaggtagctaacaaattaaatggagccatttcctttaaagaagcaaaacaaaattatgatacttcaccaaagaatcaatttactgtagactacttgcgaaacaaagaaatgaaaaaagtgcaataaaagtgcagtaaaaaaataagaagagccagaaacccttgataaacaaggatttctggctctcctacaactactcccactcgatagtagatggtaaacctctgggcgtataattttagttaacctcaaattattttactatgagtatagtgctgaacaatgggtataatagctagggttcctcacgatattgataaagatgcatttaatcaagagttaatcagatttagaattataacgtaatacgcatggtgctagttaatttttaaccaggtaccaataaaaagacattgttttagacgtgtttgaaaacccatgtatgatcgtgcagaattttgctcgatattaaataaacaacataattgtgaaaatacatcctctatcctacgccgttggtgttttaataagctctcatcacctgaacgttgtttcatatttttacgatatggtgtccaaaaacagatatctattcgttttaagaggatgtctaaaatcttttaagtaatagtgctaaaaacgccaaaacgaccatttgcagactggtggttaattgacgctcacaatttttccaaagtctccgacaattctctagccaactaacagatcgttcgactacccaacgttggggcatgacttcgaatcggtgcaactcattgcgcttcgcaacctgcacggttgcgtttaaattacttgccacatcaaatcgaaaattaacgcctgaataaacaccataaactaaaacgttttgaatctgacgtaactgcacggcatgtaaagcgatcattgcactggccccgtttcgatcagagacgttcactcgtgtcatgtgaacgttcttggcaaccgctttcaaggcatacaggatcgcacagaagacctcttaaaggtcatattttcgaggctgggttcgcttacgaaaattttctaatgctggtcaaattaattcaaattgttgccggataatattgctgggataaattttcatggtttggtagattgcaaatttaatccgaatttttggacaaatttgttcgtacttttatgtccggattcttgacataggagcccaatggcttcaatcagcaagtatcaaaaagatggtaaaacattctacaagtttcaagtttatttaggtatcaacgaacaaaccggcaagaaacgatatacaacacgccgtggttttgacacattaagagaagcgcgcttagtattatccaaattagagctacaagccgatagcggacaattagaccagcaacccattaacttaacgtttgaagatgtatacaagcagtggtgggctggttatatcaatactgttcgtgaaagtaccatgtataaacagaaaaaagtgtttcaaaatcatatcatccccgcttttggtaaatatcgtattaggacgatcaccactagtcagattcaaacagcgttaaataaatggtttaaacaaacagaatacagctttaaaccatggttcaattacactagtgctatttttaagtatgctatcttacaaggatatataagtgacaatccttgcacacgtgtcactatgccaaagaagctcgataaagaggatgttataaacttttgggataaagaccaactgaaaacattcttcaactgtattgacccggtaaacgatttagagaaatatacattatttcgggtactggcttttacaggcattagacgcggtgagtgcctgtcacttacttgggatgatttgaatactaaaaaagccaccatggacatcaacaagacgttgactcacggtgacaaagggcgtttattggttcaaccaaccaaaacaaaaaagggtactcgcaccatctcacttgatgaaagtaccctactctatttaaaaaagtggcatttagagcaacgccgtatgtatctaatgttaggcttcaacatcaataaaagcaatcaactaatttttgcaacctcaaagaatacttttaaatcactcaacacccctagcaagtggctaagagcgcttataagcgatgctaacgagagtggcgctaatttacctagtatcaccgttcacggctttaggcatagccatgctagcgctctattcagtgctggggcatctatcaaagaggttcaagaacgactgggccacgaggatgctcaaacaaccttaaatatatatactcacgttaccgaaaaacaaggtaaagaagctgttcaaaaactggttaatttcttagatttttagaaaaaagacattcaaaaggacattcatacacgattcaaattcatagcaagcccatataaatattgatatatcaatgcttgtcagaatatccggtgcaacacccgggtggcgcatatagatatatcataataaaaagccccgtcgatttgatcaaatcgacggggcttttttgttgtcttatttatcaaagaaactgtttcctacttcaaagaaaaggtattggttgttaactttaacttggcccaaaatggctttttgggcttttgttgcccagaaatatgagtaacgtggatggccataggcgtcatttaaagcaggtaagctcgtgcctggatctctgaccacaacttttttcatatccactttttgtttcttttgtgctgcttggccggtttctttgaagaattcactttccgtcaataaacggtagccatttccttgtaaccagcgcaatccactattgttcatcgcaataaagttcatataatcggttgtcagtgcccctttaacgtatttatctgggtagacaccctcccaaccgtcttggttgttggcttcggcggcagcactgctggccgatgctttaaaatctttttcattaatgaccacttcgtcactagccgctttcgttcgctcagaggatggttgataaaaaacgcctgattgcgttgaccctttttgggcaacactttggctagcattgttatttctgataaaccaggttaacccaccagcgacgatcaacactaaaaccactccctggatgatcagcgtcttcttacgtttagcacgcgcttttgaaaaatcagactcccattgcgtcataattggcccctttttgtacttcgccatcttgttccccccaaaagtatcctattcgtaaacccctttaactttacactgacactataccaaagtaatcgctatttttaaatagttactcactttttattatgtctcatagggattgagtggtaacttggcttataataaataataaaccctgaaggagtccttcttttgaataaacgaatcagttcttgtacaaccattttagtggggaaaaaagccacgcttgatggttcaacccttatcgctagaaacgaggatggctacaataagcctaatccacaaaaattccgcgttattcaaccagccgatcaacccattgattacacctcagccattaatgggctcaaaatcaaattacctacaaatccgttacgttacacttcgacacccgatgccgatgatcaatatggcatttgggctggtgccggcattaatagcgccaacgtcgcgatgaccgcatgcgaaacaattaccaacaatcctcatatcttagcaattgatccgctaactgatgacggaattggtgaagcggatttcgtaacacttgttctgccttatagccaatcagctcgccaagccgttttacggctgggtcaactccttgaaacctatgggacttatgaaaccaacggcattgctttttctgatcacgatgaagtttggtatttagaaacaatcggtgggcatcactgggaagcaattcgtatcccagataacgcctttgttgttgcgcctaatcgtctcaacattgctgaattcgattttgcctcaccaaatacgctattctcagaagatctaccaagtctaattgcgcaataccatctcaatcctgatgaagatcaagtaaacctccgccacatctttggtacagcaaccatcaaggattctcattataataatccccgcgcttatgccattttaaaagtatttggtggtcttgatgagggtgactatgaagatcaagaactgcccttcatgatggtccccactaaaaaactaacgattgaagccgttaaatgggccctcagttctcatttcgagaacacgccttttgatccttatggcacaggttcaaaagatgatcgtcaacgctaccggacaatcggtttaaatcgaaatgaagaaacgcatattctgcaaattcgcaatgatgtccccgaagcgatttccgggattcattggttagcatttggccccaacacctttaacggtttagtgccattttatgccaatacaaatacgacgccggccatttatcgtgagacacaaaccagctttgatcctaacaacatttactggttaaatcgtctaacagccctactcggagatactgacttcaatcgttatcaaggactccgcgatgcttttgaagcccaagcattaattgattgtcgcaagattcaactcaaaacggacgccgcaattttagctaatccggaaaatagcaccgcgcaactcactgtcgctaaccaagcgctcgctgatatttacttcatgaatctcaaccagctccttggaaaaatggtaactaccggcgctaaccatatgaaactacgctattcattaaatgattaataaagaagggttaagtagcgattgttactcaacccttcttttgttgtacaatagtccttataaacgtttctattgaggagcttctatttaatgcaatattttaaaaagttatttttaaatacctttacgtttttaaaacaaagccaagcttattttcggagtgttttattaatgcatggctttttacttttaatttgcctgccacttttaagtaaagccagctacttcattttagtacattaccagattcagtttttagcgttgaacaatctgcccgtacttattcaccagcacccctttgcgcttctagcgctcgtgggaattgcactactgattttattactggccttcttcgaattcacatttctactattaagtgtgtattttattcagattaaacgaccactggccctgcaagcattacttaagatgacggtcgcccaaattacgcatctgcgcatcggcaccatttttttcttcctatattattacatcctaattatcccattgggcggtttgggctaccactccgatttattgacaaaatttaaattgccggcctttattttagattacatcatcaccaatcgacggctgattgccgttttggggctcctcatttatctgagcttgttatatattggtttgcgactcatcttcaccctcccaaatatcattcttcaacaaatgtcgttaaaaaaagcgctacggacgagctggcgctttacgcatcaccaattagtaaccctagttggccggttgttactcatcgttgggggcctcgttagttttacagctgttagtttcttcttattaattcagcttcaggcgttcattgaaacccacaccagcgtcggtttccaaagtgcagttctactcatgacacttttacaagtggtggtcctcattaacctggtcctctcaactgtcgccatcttcttcgtactggttgattatctactatccgattcacaatttaatcggcccgcaatcaactattctagtctcaaactgagtgtccccctcaatagcggcttattattgctagtagcaacggttactttaattggtgccggcttttacaattgggattaccttcgcgccgtatcaattcaacaaccaatcagcatctcacaccgcggtgtctctcaaaaaaatagcgttcaaaattcactcactgcgctcaaccaaacgcaccgcttaaaacccgactacgtggaaatggatgtccaactggccaaagatcatcaattcgttgtctttcatgactttcagctggcgccgttaactggtcattcaggcacaccgcaatcaaaaacactggcgcaactcaccaatatgacagtgcgcgaacataagcgcaccgcaccaatcgcgtcttttgatgactatctcgcactcgccaaccaacgccatcaaaaactcttgattgaaatcaagacgccagctaccgataatccaggcttagtgcaaaaattcctagccaaatacgaaactaacattgaagcccacgatcacatggtgcagtccttgaactggcaagtggtggaagatgtcaaaaaggcagcaccgcaaattcaaaccggttatatcctgccctttaatttcatcgggccacccatttcacacgccgatttctacgcggttgaaatgacgacggtcaaccggcacttcattcaagcggcgcatcaagaaaagaaagccgtctttgtttggacacccaatgatcaacaggcagtccagcggatgatgtattttggagcggatggcgtgatcaccgataatctcaaagcagttgaacaagcccaaaatcaacatacaaaaccgcattacgccgataaattagcattttatgtgatggggattggataataaaaaaagtcatcattaaaatgatgactttttttatttagcataggtaaccacttgggtttgatctggatgtgcttttaaccatttggctaaagcgactcctagttcatgtgccattggcattgccgcgcgcatttgcgccggtgtaatctcattgacgtgcatcccagacactaagaccgcattattcgtaatcagtggcttaacagtttttaaaacctgatcaattaatactttttcttgatggacatgtcctgggcggctagggagtgctgtggtcaatgccttacccgttttatcgaccgtcgtgatgacgccgtaatggggcacgtcgccaccgataatctgaattaataaatcagacgtttggcgctctaattttaagtgcattgtataatccgtttcagtgaccgcaaattgtacggtttgttcggtactagcgagcgttttgacgtgcattagctaacccctcccaacgtggaccaaggttggtctcgatatgcagttgatccaataatttcattaccgtatgattgacgatatcatctatcgtttgtggttgattataaaaagctggaatcggcggtacaatcgccacacccatttgggccaacttcaacatattttcaaggtgaatctgattaaaaggagattcacggggcacaataattaatggtcgtcgttctttcaaagtgacatcggcagctctggcaatcaagttttcaccaagtccagttgcaatcgaagctaaagttttcatgctagtgggtacaatcaccatgccatcgtgtttgaaactaccgctggcaattgttgcgcccatattttgctctggatggacaaaatcagctagcgccacgacttgcttttcagtgtacccagttttttcgatggctaaattttctttggcccagcgactcatgaccagatgcgtttcaacatctggcacttgatgtaatgcctctagtaaacgaatcccataaattgtcccactggcacccgaaatgccgacgactattttacgcatgttatttcccttttcttctaattaatctaaatatttttgccaatctgcgatttctttaaattgcgcacgcttgaaactcttttgcatgtcatatgggaaagtcccgtctaatactaacttagaactcatcccacgcacacgaatccgagctggatcgtattctggtaattcagatggatctaatggatgattccgtaaaccttctaagaccatgatgtcccgatcggcttggaaccgtgtattgatggtccacatcacgtcgttccaatcgaaaatgtcgacatcttcgtccactaagatgaccgtcttcaattctttgaaggctgaaaaggcgagcaatgctgcttgtctttgaatcccttcatcggcttcgttatccttatgaatttgcatgatagtcattaatttcccgccaccagcaggggcattatagacgttcaatactttacctggaatagcacggtccactaagctcaaaattgatgcttcagttggaatgccggccattgaaacgtgttcttctgaagggccaattgttgtttgaacaatcggattatcttgacgatgagtgaccgctttaactttaatcacattcacggcaggatttgctgagccgttataaccagggaattctggcatcgcatacccagaattcgtattaatatcttcttgcattgattggtttggtaaaatttcagcttcgataatccattcagcacgggcaatccctaaggcatcaacagcgacaccaggcactacttgaacagcttcatttcttaaagcaccggcaatttgaagttcattgtaaccaagtggtgttgtaggtggttcaaaagtggccccaatggtaatcgctgggtccaagccaatgttaatagtgattggcattggttcgttgattgcttcatattcttttaagaacgcaccgatatggcgaccaccgggcatgatatacatcccaattgtatctttatcttcaagaaccattcggtgaatcgtaacgtcgctttgttggtgatccacgctatgaccatacacgacacccattgtgatgtatggaccagcatcgtcttccgtattggttggtgctgctaataatttgcggatatcaaaatcagcatcgctcgctaaatgaacgacttcttgtgctggtgcttgttcgcgtgtcacttcgacgggggcaactggtttggttaccgcttcgtttaacatttgacccagcgttttgtagtcatgatgtaaaatcgttgcgacccgttgacgtgaagcctgcaagccaattaaaacgcgacttccggggaagcctttaacattattaaacatcattgttgggccttcggttgttggccgcatgactgtcccgccagcaccaatataacgatagacacccgctaaatcagcattgggatcaatttcaacatccgtttcatggtattggcctggtaaatctttgatttcagccaatactttacgtaaatcataaggttgttcactcataaataagcctccttggcgtattgaatacaaccattattaaacaaagcgcgcaggcgaacaattcaaactaaaaacgcatctattctaaattggaatagatgcgttttctaattttcctgaataaattgccagaataagcgcactgagtctgattgatttgcttggcgtttaataaaggctaactgactgtattgtttgggatgaatcgggacggcaaccacgttttcgtaacccgctaggtcaaaagagtggttcatcataattgaaacgcccattttttgattcagcatctccaaaattaaatcaactcgccggccttcatagacgatttgcggtaccacaccggcttgctcgagggtctgcatcaccggtgctaagacgtttgtcgccccatccaatagtagaaaaggctcgtgggctaaatcttgaacggtcaatgcggtctgctgtgcgagtggattatcacgcgccatcaacgcaacaaaataatcccgctcctcgcctaaaaccgcatattcagcctgtggtttttcaaataaacgggtaaacacgatatccgcccggccatcgtctaaggacgccatcaattgatttgtctctgcctcactgaacttgaggttgatttctggatgttgctgattaaattgaaaaattaactgaaaagcttggtagcgcgaaatcgttggaatacccttaatcaccaatgttgggtccgtttgattaatctgctgatcgatagtttgtaataaccgttgctccgcttgaattaaagttttaacatccggtaaaatggccgcgcccgccttcgtcaacgttactgttctgtggtcacgcataaataacgtgaccccccagtctttttcaagcgccataatatattttgagaccgtggcctgagttgaaaagatgttttcagctgttcgactataattacacgtttgcgctaagtcgataaatgttgccaattttcgagtatccattcaatttcctccaacgtattcatatttggaatattttagcacaaaattggaattgttccgccttttttaaaccagtaaactggtaaatattgatttacctactaattatctatgggaggctattatgccaattggaattatgattaatgccctatccgtcttattaggcggtatttttggcgctttgggtggtaaaaagatgtccgccaactttaaagatggactcaatatggcctttggggcttgctcaatgaccatggggatttatgccattgcaccgatgaaaaacatggcggccgtgatttttgccattattatcgggactggcttcggcttattgattcacctaggcgattggattaatcggggtgccgcacaaatgcaaaaattcatctcgcgcttcatcaacgcgccaaccggcttagaccgacaaacatttgatgcaaccctggttaccgtcattgtcttattctgtgccagtggtactgggatttatggttctttaactgaagggatgaatggcgatgccacgattctaatttctaaatcgattctagatttctttacggccgctattttcgccgcaaacttaggctttgtcgtttcattaattgccattccgcaattcgtgatctttatcgccctattcttcgcagcacacttaatctaccccctcacaaccccttcaatgatttttaactttaaggccgctggtggtgttttgatgctcgcaactggctttagaatggtccagctaaaaatgtttccgaccgcggatatgataccggcgatgattgtcatcatgccgctgtcctggctatggacaaccattattttaccaatgctctaaacacaaaaaacgaccagctaactggtcgtttttttataccctattttttaaataattgttttacctgtagataagcgaaaataagcaaggtcaataataataatagccctaggtaaacacctagaaaaatcatgctaatgcccattcctcctaattccgcgctaccacttgtatagtactcacgaaaagctgtccacttaaaaataatttttgcaatgaccattgtgcttaaaaagaaaaaggcagttttaaaagcacgccataaattaagttgcatcatgtacctccctacttcttcttaaacatatctttccccaaataacaaaagaacgacagtgtcatgggataaaccgccttgtataagccagcaatactttgttcatgtccaattgtgtcaaaaataatattaacaataatcaggacttgcaacgttgttagtacactaatcagttcctgattatcctgtctacgggtactcatgtaaagtacaacataaatcagcgtgataccaatcatataagctatcgacattttgtttacccccgtcacttttcttctattatacgctgtcatttggcaaaataaaaaaggtatctcggcaaaaatttatttcaccgcaacacctttttgatagtctaatattaatcctcaggagatatcaaactggtgacacactctcttcgcttttactaatgcatcaaacgttgtgccttttgtgcggcaacgttcatgatgttccaaggccggtcgaaaccaggttggaagaagaagtcagcgtaagctaaatcgtcaaccgtcatcttgccttggatggctaatgagatagcgttgatattagctgtgacgtctgctttagacatgatttgtgcgcctaaaattcgacctgtttcaggatcgaatgttaatttgaatttaacttctgggttttcgtcagctgggacgaaatgaggacgataagtttctgtaacaacgacggattgagtcttaacgcctgacttatcagcagtcccttctttaatccccgttgaagcaaagtgataatcgaaaacacttaaggctgacgaaccggaaacagctggcactggttggtcagctgtgaccaagtttttagcagcgtagcgaccttgacggcgggcattcgttgctaaagcgattgggatttcttcgccagtaggtgcatatttaacaaccgttgcatcacccaccgcaaagatatcaggttgactcgtttgtagatattcattgatcttaatccgaccactacggtctaaatcaagcacatctttcaaccaagctgtatttggacgaatgccagcagcttcgataactaaatcggcatcatattcggcttgatccgtcacaaccttagtaactttaccgtcagcaccgcggtattccttaacagattgaccgactgctggataaatattatgggcttgcatttcagttgttaattcatctgtaaattcttgatcgaggtataaactcaatagacgtggtaagacatcaacaactgtcacgtttttaccagctttggcaaagacttcagcagcttcaataccgatatagcctgaaccaatgacaacaacgtttttcacagttggatcaaccgttttggccttgagcttaatcgcccaatcacgaccacgcattgcataaacgttagctaaatcgcgaccagcaacggggagttcaaatggcacagccccgacacttaagacgagcttatcgtaactttcttcacgagttgtgttattttttaaatccttaacctgaaccgtatgttggtcagcgttaatggctgtaatagcttgttgtaaacgaacgtcgacacctttagcacgcatgccttctggcgttgcatagctaacatcgtcaacattcttgactgttccttctaaatagagttgcatcccgcaggataagaacgatagaaaatcgccctgttcgtaccattggattgttgcatccggataatctagtaaactttcttgaactgtttcgaacccaccatgggatgaaccgacaacaataattttcacactgatcactccttgtctattttgtacaacttaattataacgcagataataattattacaaatgaattcggttacgccgccattctttttatagcgtttaccgttaatcacatgctaaactaacagtaccaaaaacttcgattggagactaagtaattgctcaaacaaaaattgaaacgcaatattccaacactaatctacctcgtaaccctctatattgcctaccaaattctcaccacaattatcacggtttttactgaccaaacgattctcaaaatggccaaggaatcgcctagtggcttcattgttttatttgggggcttttacttcttatatattattcttgctgttggcgttttatactcaggccacattctctctaaacaagatggtcactacgagctctcattattaatcctgaatatcctatcgactttcacgacgctaaccacgattatcctgaaattttcaggtgctcaaatgccagcaccactattaccgattaccttcttcattattttaaccacgatttcgttggcaacaacttcaaaactgctccaaatgcgggctaaccgattagctaaagcaaattaatcaaagcatgcagaatcattgaacatttcaaatccttcgtccagtaataagtggcacctagaatccagcccatcgcgcaataaatcaaccaattataattaattgctaattcatgcatgctgccaaatatcagccctgatacaatgatcttcaagaaaccattaaaccttgttttcttcaggaaaaagaaattaaaaaagagtcctctaaataatagttcttcaattgttggtgcgattaagccgttaccgattgttgttaaataaggtgctgcctgcatccgctgatcaatcaccacctgattttgtggtaatgctagtggattccactgttgatcaaaccagtttaacaagtaactcgctgctagcataagcaatataatcccaatcttcttaatcactgggaccgttacttctggcccgttagcttttgacaagcgacgataaataacaagcaacaaagtcaataaaagcccccacatgattaaatcaaacacgataaaccgtatttcatgctgggctagataatgattgctaacccctaataattcttcaacatagatcacactggttaataaaactaaaaaaatgaaataacagacgcgattcatagtaaccatttcaaaccacctaattttttgatttaagattagtatcccataatcgactttaactgtttctcaattttaatgaacgtcaataattaaccgataaacgtcaaaaaaggtatcgcgaaaattcgcgatacctttttttaaataacctatccaacaacacccttgcttgtgtctgctggtttgaagaggtgttcaataatacctgaaacccgtgttaaatcaacattaccgcctgaaaccatcgcaacaatgttcttatcttcaagccacttaggatcaatcttgccacttaataaggcagctgttggtaatgcacccgcaccttctgtgacaatcttagtccgttgcatcaagtcggtcattgccattgcgatttcgtcttcagtgactaagatgaattcgtctactaggttttgaacaactgggtaagttaagtctcctggaatagcaacatcggtaccatctgctaatgtgaagtcatcatggtgacttgtaattttgccagcatcgattgaagccgccatcccatgcacgttttcagattgaaccccgataatgtgaattgatgggttgaaagatttcaaagctgttgccacacctgaaattaagccgcccccaccaacagggataattactgtgtcgacattccaaatttcatctaagatttcaagaccaattgtgccttggccagccatgacttcacgatcatcgtaaggatgaacgattgtcatgcctttttcttctgctaattgttccatgtataaacgtgcatcgttaaaagttgcaccgtgtaagacaacgttagcaccgtaaccagccgttgcttcttgtttagcaattggggcttcttctggcataacaactgttgcatcaattcccaataacttagcggttaatgcgacaccttgtgcatggttaccagctgatgctgttacaatcccacgttgacgttgttcttcagttaaatgattaattttgttattggcacctctaaatttgaacgagcctgttaattgcatgttttctaatttcagataaacattgcccttagcgacattccggcttaaaaacatcgattgaattaatggtgtttcccggatgtaaggtttgattgttgcccgcgcctcttcaatatcacgaatatcacaaatgtcagctgtcttcaaaactaaattatttgttgccataatggccacctcttccatattgattaatcctgaacatgaatattagtgccttttgtactatcattcacaatttaaatgtagtcctctttggcccacttgtcaaagggaatcccgagtttattagaacgttttcatatggtaattagcagcttctcattattatcgacatttaacgtccaatcgcattaaactgcgaaagactgactaattggaagtcttgctcaacttttaaatttaaagattgttcaattagttcaatcacctttgcttgtcccaaactgcttcgaatactataaccttcaccatataaacgaatttggtcgaactgcccttgaagccgttcaatgactgatgctgcttctaacggcgtcttcaacgccaataaataccaactggtgccatcacctgttaaactcatatgcttaaagaaatcaaaatacgttttatcaaacattatcaaaacctccttttgtatataaagcgctatcaatagttgtataatagcatatgatagtcataaaacaaggagatatcacaatgaaagaagccattttagtttatacaacccttcccttaattattgggagcaactttagcagtcaccacgagcaggaatttgtcatgcacttaaacaccgcgcttgccgccaaacaattggattggcacgtttcactagatgaaagttttggagacagccaggccattaaggccaaaaagccagacgccttaattctaaaaaatggcttacagcaccaatttgagcggcacgattttgatcaaaaccaaatctaccaacttggcgcactagaactatcaacactcagtacacgctcagtcgtcgcatttttagcgaatcattaaaggggttgggacaaaagttatttttgtcccaaccccttattaaattttaaatatttatcgttgtaccgtattttataacgacattaattggatcagggccggtgaaaccttaaagccgttgaccatcaagaaataattaatcgcctgttgatagtcattgcggcattgactatccaagtacccatttttaacagccgctgcgcccttgtttaaatgagtcgctaattggtaatctgccgctacttgcggatcactcaaggcgacttcaattaaccgcaaaatgttcagcaatccttgatcactagccaacttttttcctccaattcgacaaacatcatcagcccttcttagtgattaaattttcgataattaaccacaaacccaacacaatacagaagaagtcaaaccaccatgaaatggtgctgatacttgcattaataatcgaccagcttgaaaataaaagatagagcccgaaataaaaatcaattgctttataaaaaaagtgattaaatgtcattctaattccccttaaaaaatgccgttagtaaccatatcgaatgttagagagtgccgttagtgctttgacttgttcagattgcgcagtcgataaagtcagaccatcttcttgaagcgcattggcaattgccaaatttaagcgactcaagatcaagggcacacttgcttttttactttcaagttctgcctgataagtcgttaaaacagtttgtaaagcaggtcctttcgaagcatcctgcaacgccttaattattgtaatcgcttgttcactacgttctgaaccacctgaataccatttcatattacccaactcccattcttaatgcataccgccaaacatcattgaagaggcgattaaaccgtaacctaaattcaaatcgcgtaatcgttttcgatctaatttttctaatttatgatgaatgtaaccatataaattgcgattagcacgcggtaagcttatcgatacgatgtaattttcatgataagcattgtagatatcgacacagacactaagcgaatctgcaccttcgattaatcgcttggcacctgctaataaggctgccttgtattcatatttttgtggttgatttgataaatcttcattgtaagctgcatcgattaaatcgaatagttcttgatcattaattgtcaatataaccaactcccttatgacactattatgctgccaattaccattttcgagtaaaaaaaatattaacgttcaactttatcggttaaacgttaatatttggtattagtatgtattcttattactatttcgaaggcgcaaaaattaagctttatcgcctaaaaataagcctgatacgattaatgaaatccctattatgacaccaacaatatccaaccaccaagaaacactaaacatcgtttcattgaatactgtaaaactagttattaaggcccaaataccaatatagagatctaatgatttatagaaattcttttttaaacgcattattaatgcactcctccatttaaatataaatattaatttttttaataaagtatctagttgataccttacaaaataattgtgtatcaaagaaattcaaactacctctctaaatgcttcaaaaaagaaataacggcatcaatatcaccttcttgtaattctaaagctcccaattgatagatatcatttttagggaagctgccagtattaaaacgatatcgcaagccattttttaataacacggcttgcggtgctttgacttcaatatcactaatatttccaaatgagctatcaagttctacttgccaactcatcgatagttcatcgattctattgtttaacttcttcacaaaattccgttccttcttattaaagataaccaaattatcaatcagaaatggcagcccttgataagctaatatgcataatctcttcataacttcccctccctaaagtcttcagatgcttctctaatgatatttacttcaccgtttaattttttatcttaaacgtctatcaaacacgttaatgacggtccttgaacttaatattaataaacaaggttatcccgataataagcattatatccgctagtctaaaacgatcttcattgcctaagatgattattagaccaataccacctattattaataaaattgaaataataattaacccgttacttttcttaagaaacactattttttatattctccttaatttatgaataggcctgtttcaggctagttcaattgccatttatagaactattatgcttcaatttgccatttctgcgtaaaaaaaatattaacgttcaactttatcggttaaacgttaatatgcgctacatcatttgttttaatttagctactagttctcgtgatttacgaaacgagacctttgcttcactgccatcgataaaacttaagctacgcgttttactgtcataattggcaatattagataggttaactaagtaacttttatcacagcgaaagagcattggatattgggtttccaacgcatttaaattacctggaaaagtaacctttctagtaacggccaacaaattaatatgccctgggttttctttttcagtatataaataaacaacttcctttaatggtaatgagaaaaagcggggaccgattttataactaaataaattttctcggtgatacgccgctgcttcattttgcttctcagccaacaacagatcatcaatcagttgccttttgatttcagccattgcttgatccttgaggatgtaatctaagggcgctatttttcgttctaatgttaacaatgtcagttcctcgtgggttgtaatgaagacaatttgcgcaaacggcatcatctgccgaatcttagttgccacttctaaaccggcttggcggttatcctcaatttccatatctaagaagaatagacctcgttgttggtccttaattgccgccaacaatgtctcagtatcactggcagcgcatgttaaagtcattgcaaattcgttaatcataatcgtattcgcgataatttgctgataaatcgcttgttgctgtaaatcatcctctaataaataaacgggatacaaattaagtttcctccgtaatcatcaatgtctgtcgtaactttctattttcaatctgtgtttctaagaataaattggtttgtttggcaatcaaatcttgtacgttagccaaaccagttccccgaccagcacctttggttgaatagcctaactctgaaaatgcttggatatccttaacttgactggccgtattttcaatcgtgatttcgattaagccttcagattgtaagaaggcacaactcactaatttatctgtttctcgaacagcctgttcaatggcattgtctaataaaataccgataatccggataatcgttaataaattagccgtcgctaattcgattggttcggtcatttcaaattttaaagtgacatcagcctgtttggccgccaaaaacttttgaatgactaatcctcgaattggctcatttttcaagtagtcaagttgtgcaatgactgccccttgaatttcactttgaattggccgttgcgctaatagttcttgataataggccttaaattgttgctgatcgcccttttcagcaaaactttccaacgataataagatgttttgataatcatgcttaaatcgccgtaattcggtgtattgttgttcgatattgactagataatcttgaagttgttgattccggacaaattggtcgttggcttcttggcgaatcgaataagccttcaaaaaaagcatcacttgccaaaatgtcatcccgatgaggacaccaaaaatgataataatggttaataatatcgttgctgttatcccttgaagatttccaattgccaatacaacttgtatcgctaaaaatagaccgaacgtaaatctgaagtattgattttccaatgaaaattctgtaatttcttgatttaagcgttgtaacttgggacggttatttttcaataaaattaaaaataaaccatccagtataacggcaatgaagatgccccataatgtaatttcagtagcattgctactcaaaattttgacgctaaaatcatgtttgataatcgacatgctaaactgactaataatcgtccctatggcaactaataataactgaataacaataatcagaattaaatcggcactatctgttgttttaatcttattttctttctgctgatgaaagtgccatcccaaccggattaataccatcacgagtaaggatgcatctgaaataaacagatatagtattgaaaaaataactgttattagcacgtccattacgatgcgtttaaatgttatttttctttgaacatatctatacaataaaaaaatcaataaaattgcaacgaaattttgtaaaaaagaaacccatacatccgtatataacatttgtcccaacaacctatcttatggcaatcaaatctacgtttaacacgaagaaaatttcaccatacccctattttttctgaaagttttttaaacatcatcatactttctcctaatcttagtctaatcaaattatacataattcacaagcttatcttattaaaaataactaacatccgccaacagtcgataacaactaaaaaagttggaataaatgattttattccaacttttaactacccaacaaatttatataggacatagaatagaccaacgattttaatcattaaatctactttccctgcccaactgttttcgacattcgatgaatagagtaagaaatgctctcctaaactagcaacgccaaaaacgattagaaatcctaaagccgcttgtgaatgactcaaataagcggccgctataatgattattgatattaccaaagaaagaattttttagtattcctgggtttgtttcaacaataagctcaaaaggcatcctcctaattagtgatcaatactttaattggccaactaagtatcttatccgtttattatgacttattattaggtcaatattcaaaaaaaaagattaacgtcccatttcaaacgttaaacgttattggtacagtaatgcacatttcaaattttactagtcaggtcaaattagcggctgatcatgattgacaaaatattgtctgagcactataacgagtatgaaatatattaatccatggagggatttacatgacaaatcaatcaatggtcaaagagaatattcacaccctttacaacagcctaatagctcatccagataaatcaaacgcacttctcgacattaccgatgttttgagtcaggtctatctcacacttgaaactgccaagaatcctgaagcgttagtcaaccgcctctcaaattatatttatagtgttggctttggtaaaattcatctcaataaatctgaagaacaattattaatcgacctaggtgcctatggtcaaagagccggctggaatagtgtttatcgtggcgactataccgccaaagctgaatttttcaactattctgatgcccgtaaatatgctagagtttaaactaaaaacgcgactaaacaatgaatcacaagattcgttattttagccgcgttttttttattttttcatttgtcggcgtttagccagtttttcattcattcggcgcacatcaatccagttactaatttgcaatcctagccaaacgagggcgtaaatcagtgttacaaacagtacatggcgcactggatgggctataaaaatgggccacaagccgttataaatgccagttaagccaacgagtaataaaacgccacaataatggctaaagagcgcccatgcgaacggtattttttcgctatcaaaaatcattgatataatcccaatcaaggcactcatgacccaattgcttagaatattagcacgcgttattgtaatcgttgaattgaggctcatgatgaccactaaaaaagtaaatgaaccaatcaataacccaatccccgcactttttaaactttctttcagcatctttttcacatccctaattgttgtcgcaactctggtaagtatttacgactcacactcatcttcaactgattcgttaaaaaggccgtcatactaccagaaaaagcagcctctaacgattggagatggttcaaattaatcgcggccccttttgcaacttgaatgaaatcttgttggcttaatttgctgagtatcttcttcaaaacaccccgaatttgataggtcgcctcaaccgtgtagagcgtcacatcattaccgtagacctctagtgcgataatctcggcagttggcactaacacgacccgctcatcaactgtaatcggataaacatcaaccgattgctggcgggcttccagcgcttgaatcaattcgatgaccgtcggcgaaaggtgggcagcttgaaccgtcacttgaatatcatcatctgccaagtcttcattttgttcaaaattaaccttcaaatcacccaccatcttttatctgcttattataccttattgattgctttgcgacgactgctcttggcaaacaccagtgtgagcgcgccaaagacgacactaaagcccgctaagattaaggtatttgcttgccaactggttaaatgctgcaactgaatgccgatgcctaacgtctgttcaaactgatgacgtaattgaggtacctgtttgaaagtcgtttttagttgatcagccatcaatacttggcgatagatagccgcattatatggaaacggcgtgattttcattaaattttgagcggcgaccggaacagctccaattggtaagtaaacccctgcaaaaaagccggcggacgtccctaaaatggtgccgattttccctagagaatccagattcgtgacaaacgataaaatcaataagttaaaagtcgtccagacaatactactcaataacattatgcccataacgggtatgattgctgctagcgacaacacaaattgatccgtgaggttaaaataaccaaccattgctgcaaacatgaccaactgcatcaaggtgccaatgatcacggcacttactaagtagctgaactgaatgccgatgaaggacatatcagttaatgctagatcggctagtgttcccgattcgcgatcgacaatcatctgatttaagccattagcggttgtggtgaccgccgtcacagctaacgtcccaccgattaaccagggatcaagcaacttctgaggagccgctaattgtgaccaactggctagcatattatgcttcaaaaaaacgaggtacaatacaaacgcaattaacgcacccaataatgaaaagaacaccccacttttattaccgaaataaagcgctaagtgccgtttaactaaagccatcattagcgaatctcctttcctgttagtgccataaaaatatcatccatattaccctggcgaaattcaaaatgggtaatcaccgactgcacttttgttaataaagcgattgcctgttgatcatcggggagcgcaatctgtaattgatgatttgtttgtaagacacgccattccggtgctaattgggccaagacaacttccggataatcggtttcaatcatcaactgactttgtgcataggttgcttgtagttgctcaaccgtatcggccgcaataatttgaccatgatcgatgacatagacaaaatcagcttcagccgcttcttctaaatatccaagccagtagacggttcatccaaaaaaagtagtttaggttgatgaatcaacgcccgggcaatatcaactcgccggcgctgaccgcccgatagtgtcccgtaagcttgcttaagaatcgacgttaaaccaaaagcggtaatcaattcactttcaggtgttaaagtgacgccttgatacatatcagcacgacttttgagattttgccaaaccgtcaactgattatccaaaacgcttttttggaaaacaacaccaatctgcttttgatattggcgactatccggcctgagacctgccatctcaattgtcccggcagtcggtgcaatcgtaccggttaataaattaatcgtggttgatttacccgcgccattggggcctaagaaagccactagctggccggtttgaaccgttaaatcaatctgcttaacggcagttttagtgccaaatttttttgtaatccctgttgctgtcagtaatgtcatcgctacagcctccttatcaattacctcagtttactggcaaagtggctggcttgtcccctacttctagataagtggtctgaatactgcgacaagttgttcttttaagcgcatcaaaaaaagaaacgtcactagtgacgtttctttactttattaagccgcttattatgttgtttggttgcgcgtttcttatatttcttctcctgattttccagtaaactgaagcataagtatacgccacctaagaccgttaaaatggctaagattaaccctacctcatcgaaatcattggccatatattgttcctcatagtggtgccgctcatgatgcatatgatggtaatagctataaggcacacccagtctctgggcaattgcggtcagcccttttgaataagctagattcaacataatcatcaccgcaaagccaccaccaattattccgatccacatcacgactttgagccataccggccatttccttttctgagtcatcttagttaccccacataacgatttttatttagtatacctgaagcaatctagtaaaaaaaggcgcctgatttgtttataaaatagtaaagttctgtccactcaattgaaagaatcgcttgtaccatgtgatacttaaatcactattgatataaggtaggtttttattcatgcacaaattcattattgttattcactagcaggcctcgtgggtacttatagcttactcggtgcacttctcagtttatgggaaccccactggcaagcgattctattaattgccgccctcacgattggtattgcagcgctttgttcagtggcgtatcacaaagccaccacctcaatcggtcagaacgctctactactcgcgggcctcattatgctgatactgacaatcatcgccagtcaacaaattggttatagtgcaatcatcattggcttagtgctttgcattgttggcgttaatttgaagagttggttacagatgaacactagggctcattaatttaaaaaataaaaaagcgccgcaacaatcaaatttctgattgttgcggcgcttttatatttaacttacatgacatcaattttaacgtcgatattaccacgtgttgctttagaatatgggcaaacttcgtgggctttttcgaggtagcgcttcgtatcttctggtgagaggccttcaatatgaccgacaagttcaaccccgatatagaaatctgcggggccatcattataaagtgaaaccgttgctttaaccgttgtttcagctttaatctgatcctggctcaaaacgagttccaaggcactgttaaaacatgaactgtagccggcagcaaaaagttgttccgggttggtgctcttaccagttttatctgtgccaggcgctttaatcacatacttcgttgatttttctgggtcgtaaacaaatccgtttcggccaccttcattaatcatcgttgtttcatattgctttgccatttaaaataccctctttctgaattggatacccttactttagcatagcgccacttgaaacaataataatctgtttggtggcttattgccccttaatatacgcggtcttataactccactgcgttccagcagtattatgaataatccctttgacctttggattttggagataacccgtttcgttttggtataacggtgtcaggctttgtgtgcggttcaagacttgtgctgcttcgaccatatcagcccatcgttgacttggatcattagcatcctgatttgtagctaaatcaacgtttttttggtaatccgcattcttgaagccaccggtattattagccgcacctggtagcataatttctaagaatgaaattggatctttgaaatcggccccccaagcggataataggatgtcgtagtcgccctcatgatcgcgactgcttgcaacttggctaggcaccgttcttaagttgagctggaagcctggtaaaatttcttccaattgtccttttaaatactggctgacataagatgtattcggatcatcactatcaactgttaatgagagtgtcaccttcttcatcccggttgcttttagcgccttttgccaatattctttggccagttttggttcgtaatcaaccgtatgtggcaccgcttgtgatttggcaaaatcgacctttttaacaggtgagttggccaacccagaggcgacaaagcccgtgaccggatttgttttaaagccatagaggcggttgttcattgtcttccgattaatcgccagggatagtgccagacgcgcatcttgattattcaaaatgtgtttgacctgttgattgtcactgttgaaattatattttaagaagtaagtttgcgcatacggataacgcttgaaatcgcgattacgactataattttcaacttgttgattatcgagttgggttaaatccaaacgcccatcttgatagagatataacgctgtgctggtgttttccaacaccgtaaatttaacggcacttaatttcactttcttataatcccaatagcgcggatttttcttgaactgccattcttcactcgttccggaccagcctttaagcttaaatggtcccgagtaaaccatgtattttgattttgtcgcgtatttcttaccgtacttttcaatcaccttttgatcctgtggcgcaaataatggataagccatcaaggttttcatataagcaaccggtttggttaacgtcacttgtaacgtgtgcttatccaaagccttgacccctaattgcttcggatctaatttaccatccgcaatcgctggggcgtttttgatattgctaaataggttcgtgtaaggcgatttagtcgttggtttaatcgtccgttgccaagaataaacaaaatcttgggcccgaattggatcaccattactaaattgtgcttttctaattttaaaagtccacgttaaaccgtcatctgaaacctggctactctttgctaagccagcttcaattttacctttttggccgagtcggtataaactttcgaaaatattaccagtttgaccgtaacccgttgaagtcgagatatcgatcgtatcaagcggcgcctgtgcacctaactgtaaaacttgtttggcctgcacattagcaacattgaggatcaagaacagactacataatagtgcagcccccaatccgattatgaatgttcgtcgcttctttaacatcgtatccctccttcttacaatttataagtgaattataccggaccgcacacagaaagttaataaaaaaggcttaaaaaagagacttatctgctattttcagataaatctctacttggtaacgttttattgcatgatttcaaataatggttggcggaattcagggccatacataaccgcgcccaccggtatttcgtagttcaatgcttcattaattttagtcgtccaagttggcccaaaaccaccacaaagttcgataaactgaaccccttctgccttcaattgtggggctaatccaatcaccgagccatccgttttagcgcttgaatcaaaaccgaccgtaatcatttcacaggttccagcctgattgcgattaataacggtattttgttccggggaaaatgcgggtgaaaaataaaaaaatgcccatttatgcaggttttctaaactcatattgacgcctcctttatgcttgcaagcatagtcaattaacgactgcgatgcaattttaaagtctgaccgttataaccagccattatggcgcgcaatttgaatcgcctcaatccgattactggcggctaatttgctgagaatcgtcgacatgtaattacggacggtcccatccgataagaagagttgactcgcgacttctttattgctcaaaccattggccactgcctgcaaaacatcggtttcccgttgtgaaagtggattttgcggttgattggttaagccgaccactaattctggggcgtagactgttttgccggccatcaccgagtgaatcgcgacgattaaatcatcactggggccgtcttttaagagataaccggcaacttcagcactaatcgcctgtttaaaataactagtctgagcaaaggtcgttaaaatgatgaccttaacctgtggctgttgttcatgcaatcgtcgagcgatttcaagtcccgttaaccccggcatctcgatatccagtaaagcgacatccggttgtaaggttgcaatctgttccaaggcgatttggccattagtggcggttccaatcattgttaggtcatcttctagctctaaaataccagctagtgcggtatttaaaagttgttgatcttctgctaaataaagtttaatcattttttgcctccgtaacgattggcattgtcagcgttaacgtggttccgtggcgaccatcaacggtcagttcaccctgaatcacttccaagcgttcacgcatccctgccattccatgacttttaaactggtcagcctttttcaagcctcggccgttatcttgaatcgtcatctgaaaagtcgttgccgattgcgcaaacgtcacgtaacactccgtggcgtgactgtaacgaataatattagtcactgcttcgtgcaaacattgtgctaatacttgttggtttgattgtggtaaaccttcaatttgattttcatccttggttaataagatgatgcccgctacgctgagattacgttcttgattaatcaattcttcggcaattgtcgtttgccgtaagccggccacaatgtcacgcaccatttttaaattctggcggtacgcttgttcaatcgccaatagttgttcaggcaccgcatccggttttttagccaataatttacgcgcatatcccgcttttaaagtaatcatcgaaaacgattgtcctaagttatcatgcaaatcacgagcaattcgctggcgctcattttatttaatgatttccgtcaatcgttgattggtctgcattaactgccgatttttgcgattataacgttgaattgaaccggctgcaaatggggataaaatgcagaataacccatagacggctaagccaacccaatcatcacgccccatctgaccaccataataatagtaaagaaaaagcgtgggtaccaagattgacagcatataggccccgtaataaccccagaaactacgtcggcgcatcggaatcgagccaaacacccaggccgtataaatactgagatagagcgcttgaacaatcaccgcaagaatcgcactcaccaccatttggagcaacaaccagaacggtcgatacgtagtggcaacataactattgcggtacgcgatcacaaaaataagcaccaaacctataatgacttgttgccgcaatgttttaaacggaaacgcataggcgattgggaaaagtaaaaagagtaaccaaacatacggaaaaagaccgtattgttggggcattgcaatgtaacgtttaaaaaaagacattaatgacgtgctcctttttgatgatgatttaagtatacgacaagcccaactaatatcacagtccaaccaagcgttacgccataatctgcgaagtgaaccgtcttttttaaaacgattgactgcgcgatttgattgattggataaaccggtaagtgccggccaatgacttgcacctgtttaggcatcattgctagcggccaccaaagaccacttaaaatcgcaagcggaaatgcgagtaaattcgccgccaactgaatttgattatcatcatttaaaaacgaaatgctaatgcccagcaaacaaagtggtaaacttgctagccacaaccatcccgctgttaatagccatgttgtccatgccaattggagctgattgctaagtgctgcgaccacaaaaataacgataatagttaagccgttgataacgcctagattaagcaactttgccgtgtaataggtcgatttgctagttggtgacagatcaatcaacgctaacaagccttccctcatatcattataaagcagcgtcgataacgtaaaaacattgctgagaattaaactatacgtcgtcatgctaaccatgtactgtagattgaaacttgcactcactagaccttgattcatcacttttgtaaacaagagataaaaaccaattggtattaataaagagaaaaaggcaaatctgggatttcttaaataggcccgcttaaaatccatttttgtttgtgtcatcactgtcttcatctattattcccccattatttcgcgatagatatcggctaatgaactcgcttgaattcgaatatcgtggacctttgtgagcaataacggtgccaactgtgctaatacctgatcactatcactaacttgtaatgtcacttttgcgccatcttgactggcactggtaaccgctgaccactgtgtaaaactatccagaggttcggtcgtcgtaaaactaacttgcgcatccttgaattggcgttgtaacgtggcaaagtccccatcatattgaaattggcccgccttaagaattaaaatccgggtcgcaatgtgctcaatttcctctaaataatgggacgttaaaatagtcgtcttcccttgttttttcaaacaatcaatctgataccaaaatttctgccgactaccaacatccatgccaaccgtcggctcatctaaaaagagaagttgtggattgcccgccatagcgagggcaaacgataaacgtcgtaattgaccacctgacaactgggacactaatttttgggcgtgttccgttaagtccgcaagtgttaacaacgtttcaatcggtagcggtgtttgataataactgcgcactaatgccagttcttcgatcacttttaaacgtgctagcggcacatccccttgggtcatggcgccgacttgattaaagtggtgtttttcatttggttgttcgcccaaaatacggatctgaccttgcgtcggtgttaatcgtcccaacattaggttaattaacgttgatttgccggccccattagcaccgatcaagccgataatttcacccggttgaacagttaaatcaagtcctgctaaaacaacttgggaatcgaattgcatttttaattgttgaatatcaatcatcttagtcacctcgtttgaataaaccaagtatagcgaaatctctcccgtacgcttatacccatttgtcatgactttgatatgacaaatgtcacatcttcgcagcaccgtgttaaaataaacgtgtttggaggttttaagatgacaagcatacaaccagcaccaatgtctttttttaccaatcgtcccacaaccgagattgcccgtgatttactggggactcacctgttatacacgagccaccaagggaccctcggtggtttaatcgttgaaaccgaagcctatgtgggtgctcaagatactgcggcacacgcttataacggtcgacgaacgccatttagtgaacccctttatcacgaacccggcacgatttatatctaccaattacgcggtttcttcctatttgatattgtgacgcaagctgtggatcaaccacaaggcgttttgattcgggccatcgaacccactcacggtttggcgcagatgcaacgcaatcggccgaacaaacctggtgttaacctcactaatggccccggcaaattaatgggcgccttaggaattcatgataaacaactgacttttaaaaatgtggacaccgcaccgttaacaattgatcttgcaaatcggcaacacccacgtcacattacaacggctccccgcatcggcgttaatactgaagcggccagtggccaactcccttatcgttattttattaccggtaatccctatgtcagcggcactttaaaaaaagattgggaccgtgaacaacacggatggctttagggttcagttattccgtctttttaattgatagccttaatttgatattgtaaacgatttcaaaaatgttataattatttgtgaattaaatatttaaataagagggtattctcatgaaaattaaagcagcagtcgttgaacaacaaggtgcaccatttgtcattaaagataatattgaattagccccactccatccagatgatgttcaagtccacatggtcgcaagtggcatttgtcattctgatgaagcactccgtaaaggtgatgcaattattggttatccaattgtgcttggtcatgaaggttccgggattgttgaaaaagttggctcaaacgtccaaagcttaaaagttggcgatcatgtcgttctgtcattttatgcttgtggtatttgcgaaaactgtcttaaaggggtgccaacccaatgtttaaattatgctgaaaataacctttctggtgtacgtccagatggtagttctcactttactgaaaacgaacaccatgttgctgatatgtttgatcaatcatcattcaccacaacgactgtcgttcgtgaaagaaatgccgttaaagtgcctgatgatttagatttacgtgaactcggacctcttggttgtggctacgtcactggtagtggtactgttttaaatactttaaaaccaaaacctggtgatacaatcgccgtcttcggtacaggggccgttggtttagccgcaatgatggccggtaaaatttctggctgtacaaaagtcatcgcagtcgatattatcgacgaacgcttagcactcgctaaagaacttggcgccactgatacgattaatagtcgtcaaacagacgatgttgtcgcagctattcaagcgctcactaacggccgtggtgtgaacttctgtgtcgataccactgggattacaccagtcatggaagactcaatcaaagcactttgccaaggtggtgtttcagcaacaatcgctgttacccctaaccacatcgatctcgatacttggaacgacctatgtgttaacgataaatcagtcgttggcgttaatatgggcgattcaatcccccaaatcgacattccacgtttgattgaattctaccgtcaagggatgttcccatttgataaaactgaaaaattctatcgcttcgaagatatcaatcttgcaaatgaagcatcaattaagggcgaaacaatcaaacccgtcttaattatcgacccagattaccaactctaatccaaaataaaagcgagatgcttaggcatctcgcttttttgaatttttatctgctttccgatgtgatcttcgccggattgcctgccgaaaatctgatgatcgataagccaacatcccagtataagctaaactactacttcccgacaaggcccatagaatccaccagtcaaaggcgtaaattcttctaaatggtaataattcttctagcgcactgtgcaaaacttcttgggagagctctgctgtatccatttggtggtgcgctaaaaaaatactgaacaaaatttgaattcccaagattaatccccagcctaatagaaacggccaaccacctctaatgctaactttcgtttggccttgaacattttctaaagacagttgcgcaaaccgaccttgaaaagtgccaatcgcaattcccaataagataataacggtagccaacaacaggtttgtagcgttcagcttaaaagtcgtgacaaacatcaataacgcgtagagtggtagtaaaagatagcggagacgtcttggccgttctgctttaaactggctatagcaaaaataaataacaattaaaattccaatcaatgacattttgtaacctcttctaacggaataggcttcattatagatatcttcgatttagaatacaatcttttttaatcaggaagcatccctaatcttgtggcccaaaccgctttgctaacatgcgaactagcgcattatctggaatctgatgatagatttcaacaaagtcgcccgaccggtgttttttatttaaaatcgtttgaataatttttttgccaaccacttcggcagaatacacgaaaggtcccgtgacgttattatttaagtccgtcgacataatgcctggatgaatcgcataaattaatatgttttgcgcttgttgttcaaacgaaatccccaacgaagtcgtcatcacattttgagcgcccttacttgttttataggcgagtgggttccaaagatgattggcgttagttggcactgtaatgttgacgattgtgccttgattttgatgcagcaatcccgttaattggttaatcagtagataggtgccaaagaagttgacttgcatcgtggcttttagatcctcaatcggcgtttcataacccacgtattccttgccgggaatacccgcattgttaattagtaatgatagttgtgcatggttttgctcaatttcaacggcagctgctttaatactaacctcgtccattaaatcgagttgcacgaggctcagattagttagtcctaatgatgttaactgactaattgcctggttgccacgctctaaattgcgaacgcctaaaatcacttgccaaccgttttggcttaaattcttgaccaattcaaatcccaatcctttatctgaacccgttactaatgcagttttcataattgactatctcctttgatttctttacagtataaacaatagaccatactctagtgcaagaaagaattgaaaaaatattatgacatactcaattaaacaagtttctcaaataaccggcctctcaatctatacgattcgctattatgataaacaaggtctattaccctttgtcaaaagagatagtagcggctaccgagcctttaccgatgccgacatgtctctcattcataccatctgttacttaaaaaatacacagatgaaaattgctggcatcaagcaatatattgactactgcatgattggtcagaatcaattggagcccgcaagacgcttctgctgaatcatagagccgcggtcgttaaaaagcaacaagcattacttgaaggcttggacgaaattgaccttaaactatcagtttacacagattctaatgctaaagaaattatcggtaccatgtttacctatcttaaagaataataaaaaaagccgtgctaatgcacagctttttttgactaataatctctttgatcaatcgatcgtaagataacttcattgattcccacgttagctggtgtctcaattgcataaaccacggcgttagccacatcattggcactcaagccagtttctgcttcactcttgagaaccgcttctcttaatttcggatcactaattttagcggccaattcagtttgcgcatgccctggtgaaatcagcgttgatttgatacctttaccaacttcttcaactcgtaagccttccataacagcccgcatcgcatatttagtggctgaataaacagacgaaccttcacctgtaaaatggcccgcaaccgaatcagttgtgataatatggccactcttttgttgttccatgattggtagtgcgtatttaatgccgtataaggcacccttcagattaatatcaatcattgcttcccactcatcgactttaccgtcacgcaacattgaaacaggcattaacccggcattgttaaacaacacatcgatgcgcccaaatttagtgattgtagaatcgatcaaggcttttacatccgctaactgcgtcacatctgttttttgatagataatctccgtatcatatttagcagtcaacgatgcagccaatggtgccaacatactttcacgacgggcagctaagaccaacttggcccccttagctgctaataacgtagctgtttctttaccaatcccacttgatgcgccggtaatcacgacgactttattttgaattgtcatttttatccctcacttttagttgataaggttagtataggcggcttatcagaataaacaattacgcactttcgactaactaaggcactttaaagtaagttttgtaacatagctggtacttttttaacttaatgtattatttaatttttgaataatacattttttgaatgtttcctattcaaatttgcaattgtacttccaaaattttgcaccgtatacttcaaggtgcttaggaacttaacacacaacttggaggtaagacaaatgacagtcaaaattactgaagaaatgatttttagcccctcttttaactatctcgataatggtatcgaacacggtgtccttagcccgtttgaaacaaaagaggtgattcttaaaaaaggacaacaaattgctgaaggcttcaaacccctttcatgcgatattaaaatgttaaaagacacgcctgttacattgcgcgatggcgttactatctacgctgatatttatctgcccgttactgaagaaaaagtacctacactaattgcctggagtccttatggtaaaagtgctggtactgcaccccgttacaagaacttgttcaatatgttaggaatgggcaatacttggaattcaggcctcactaagtttgaagcgcctgatcctgcttattgggtacaacatggttatgccgtctgtaatcctgatatgcgagggattgcccacagcgaaggcaatacaacaatgcttggctcacaagaagcccaagatggttacgatttaatcgaatggttagcggctcaatcatggtcaaatggcaaaaccgcgctaaccgggacgtcataccttgctttttcacaatggtacattgctgctgaaatgccaccacatctaacttgcattaatcccactgaaggcttgtctgatggttatcgtgatttagccttcattggtggtattcctgacaccaactttattgaacgactcgctgtgaatcacgtcagtgccaagcacgcacaacgagaagatctcgctaaagaaatgcaatcggcgcctttagctgacgcaccaatttggcaagataaagtggcagatccaagtcaaattaccatcccccgcttttgtcatcgctagttattcaaacacacttcacacgatgggcacgttccgttcatggcgaacattgggctcaaaagaaaaatggttacgaatccatgatcgccaggaatggccctattattacgatcaagaaaacacagaagaattacggcgcttctttgacttttatttactgggaaaagacaatgattggttaacaactcccaaagtacgctatagcattattgattttaaagggacaaaccaaactgacattccagcaacagctttcccgcctaccgaaagcgttactactaaatactatctaaacggtcaatctagaactttacaactaacacccgaacaaaatgatttaccagttagttatttagctggcggcctccctggcagaacatcattccaaatgaccttcgatcaagacacacaatttgttggttatcctaaagcaaaactcttcatgagtgttacggattacaatgatctggacgtcttcgtttggattcaaaaactagaccgtcgtggcaacgtactcagtgaattcgtcgtgcctaatcatggcgcggctttgcaggatttcacacaagaaggcgcttcggctttacggtataaaggtgcctggggccgattacgagcttccatgcgaaaccttgatactaaactaacaactcctgaaattcccgcttatacttttgaccaagtcaataaactcaccgaaaacgaaatcgttgcgttagatatcgtactgagtccacttggtcttgcctacaaagctggcgagactttgagagttgttatcagttcaaaagacgaattaggatccgttatgccgggtacacctggctgtacgccagataatcatggtacacataccgtccataccggcggtcaatatgcttcctatatccaacttccccttcttaacaaataataaaacttgttgatccaatatgtttgtagtaactttattacagttactacaaacatatttttttgaatcgaggcccccattgaagatctctacattacaatactttgttgaagttgccaccgaaaaaagttttacgcgggcggctaataatttatatatttcccaacccacactcagccggcacattcaagaattagaggctgagttaggtgtcacgctcctgattcgacataagtatagtgttcaactctccgatgctggtgaaaaatttttcaccgaaacaatcgacgttctcgagaaattggatcatttaacccacctttttgatgaccaaaaagatgtctcacaatcttcggtggttattagaattggcgttttacccaattttaatctgtcgcctttagaggaacgcttagcgacatttaaagcgactcacccaaatgttaaaattttgctaactgatgatacccctatgaatttagccgatggcctaaataacggccgttatgacttagttttttgcttagcatcttacttcgcaggaaatcaaaacattgaaaagcacttttttatggccaatcatctacaaattgcgctcccccaaaaacatcatctggcacaacaaccctcgttaaaattctcagaacttgaatcggaaacgtttatattattggaacgcaaacaatccccaattatcgtcgactatgtcgttaatcagggacttataaacggctttaacttacgtgcggattattacgtcaacaaccttgacgaaggtttgaccgctgtttctgctggcaaaggtttggcctttttatattccggtatgaataacggtaatttggcacagcaatatcatataaaaatcattgatttagaagatgttaaccaggatcaaaatattgtaacagtcacgcgcaaaaccaatcgaaatgcactattggcgcaactgaccgcatcacttaaactcgataattctggtgagtcttaaagctcatatttttcatgatctgtgtaagtcaaatcgactgctacaccgctttgctttagaaaatcgattcgggcttcaccccagttggccatcacgcctagaatgggcaccaatgattgtccatattcagaaatagcatactcaacatgtggtggtacttcattaaaaatggtccgcgtaataatcccatcgcgctctagttctcgtagctgatccgtcagcacttttgatgagattccttgaaccgctctttttaagtcagccggtctttggggaccatccactaaatgacataaaattaatggtttccattttgtgcccatcaccgctaaggtcattagtacgccatttgtataatgattttgtggttcgttcattaaagccacctcaatttgattatgattgatctatcataccttaaccgcagtcaaaagaaaatccaacacaaaaaagaaggtcgctatgaccttctttttttagcggtaccattctggtttgtcaccatccgtattgggtttatttaagcccaatgaatcaccaactgcttcagttgggttttgaatcaaacggacaacttctgcagcgacgctttttctggaaacttcggtacccttgaaagcatccgtgcggtgtgtgatttcataatcgatttcgtccttatcagataaccaagctgggcgaataattgtaaaggctaaccctgacgtttcaattactttggcggcggctgcgtatgttggcaaataaccatcgtctaacatttgatggttccactgaccgtattccccgggaacttcgtcatagatgccgagtgttgagatccaaattaagcgtttaacccccgctgctttcatagcagatacaacggctttagcctgcgcttcaatattagcgcccgctaaatttgcgtagacaactgtgacacctttcattgcttggactaaatcagcttgctggctagcatcgccttcaaccaactgttcgcgttgttgatcttggattgttagtcggttcgcttttcttagaaataacactaattgcgcatccgttttagctaacaattgtgctcgtgtcaattgtgcaatcttgccatgcgcccctaatattaataccttttccatttaaaacgcctcctaaatttatcactatctaaagtgtagcgactgctaaccttttttacaaataaaagcacttacaaaaagatagtcatatttatctaacaatcgcaattaaatattcatactttgttcatatttaattgttattctatttatatcagatgaacgcctcccaagaatcatctgattaacccgaatcgacatacctccctatgtcggttttctcccagaaccatcctaataataagcaatcaattgaaattcctcccaagaacttcaattgcaaggtcgctatctcccaatagctggccacccaaagatgcgaggtaaagggccgctactcagcgactttttacctcgcatttttgctttcgcataaaaaccgtcaattcgtcttaatttcatcggtgaatcttcatatttcgttcacattcaattggtattctttatacatcagataaattcctggggttgccacgtcataggtttctaatgggtcagtgattggggctgctttaacaatcatttcagcgtttgcactgtttttcgtgaaagtgccatttttagcaacaattttaaccaagactttttgatcagccgttagcgccgttgtattaattgtaaatttgccatccggtgccactgcgccagaatcaagtctcacagcgcgtgtccgaccgtttggtaaaacaatcaccgcttcaaaggttgtccctgctggccaatctggatcaagttgaacttgaccactaacttgggtttcacccgcaattccttgattaatcgttggggttgccacgttgtaatcaactaatggatctgtttcttctttttcagaaacagtgacggaagcggattgactttccttcatattcgcaccatttgttgcgactactttagcggtataggtttgccccgccactaatgcatcggtcggtaattcgaactgaccactactattgatggttgtcgctttcgtcgttccgtctggtaatgtaattactgctttaaagctcgtcccatttggaattggttggactaatgtgacttgccccttgattgacttgtcgccttcaactgccggttgcatcatcggagttgccacgtcataattttcaatcggattagttggtaagcctgcatcaaccgtcaaactgactgtctgactgtctttcttgaagtttccgttgatcgcagttactttagctgatagtatttcgccggctgtcaacggttttgtaccaactgtgaattcaccagatggcaagattgttgcggttgtcgttgtgtcatcttgtaatgtcacgctcgcttcaaaagttgttcctgccggtactggttgtttcaatgtcacagaaccactgacatgtgtgtcacccactttagccggattcaatactggcatattaacatcgtaatcagcaagtggattttgttcaactgctgggccaacattaaccgttactaacgcactatctttagtataaatactattcttagcggttaccttaaccgttaattgatcaccctcagttaagttaccggtcacgattgtaaaatgaccattttcatcaaccgcggctgttttttgcgtgccgtcagctaaggtaactgttgcttcaaaacttgtgccttctggaattggttctgcaagcacaacttgactagtgacacgcgtttgatcagccgttaccgagtcaactgttggtgttccaacttcgtaatccgcaattggatctgttggtaatttttgactcactttttggtaaacgacactactatccttggtaaatgtgccattagttgcgaccacctttacagcgaccgtctcatcggcaactaaggccgccgttggtacggtaaattgaccatcggcaccaattgcgacggctttagtggtgccatctgcaagtgtcacaatcgcttcaaaagttgtcccgtttggaatcggaatccctaggttaacctggcctttaactgccgtatcgccttcagttaatggcgctacgactggtgcattaaccgtatagttttcaagtgggtttgtttcgactgctgcatcaacggttaattgaactggattactctctttttgataaccactattgtgggcagtgacatgaatttctaatatatcatcagcctttaattcacccgttgtaaccgtaaaagtaccatcatcagctacttcagcagttttaagggttccgtctggtaacatgactgttgcttcaaaagttgtcccggctggtgctgggttcgttgtcagatcaaccttcccagtaactgtcgtatcacctgcagaagcagcgtctacaactggttgagcaaccgtataattggctaatggattcgtatccggtgcttgggtaaccgtcacgtcgactgaagcactatccttggtataaccactatttttagcagtgattttaaccgataaaacatcatcagccgctaattgacctgtttcaattataaattggccatcggggctaacattggcgcgtttggtactaccatccgccattgtcacaacagcttcaaaagtggtgccagctggtatatcggttagcgttactttccctgttaattgtgtatcatcggttgtcatcggattaacatccaatgtggccaccgtataattttcaagtggatcggttggcaccacttcactcaccaataatgaggctggtgtactttctttttgatagatcccattttgtgcgattactttcacggatagattttcacccgcaactaacgcccgtgttgggacttcaaagtcgccgttagcctgtacatcagctgcaacggtcccaccatcaggtagttggacttcagctttgaaagttgttccttctggaataggcacctgtaaatttacgtgaccacttaccttggtttgaccagcggttgctgaatccaaggttggcgtcgtcacttgatagttaactaatggatcagttggtagggcgtcggccaccgttgagttaactgcggccccttcttttgtaaattgaccattaatggccgtaatatggatggctaattgactacccgcaactagcagctcttctgtattaaccgtaaagtcaccatttgcttgcacatccgccttaacttgacgaccaccaggaagcgttaccgttgcttcaaaagtagtattatctggaattggcgtcttcaagtcaacgtggcccttaacgttcatatcaccagcaaaagatttttcaactgtcggggttgccacatcataattggcgattggatcttcaattggtgcatcagcaaccgtcaccgttacattcgcacttggttttgtgaactgaccgtttgttgccacgacttttactgccacatctccggcgactaatggatcagtatcgatactaaatttaccggtcgttgtgtctacatcagcactgacttcagtgccgttcgctaaagttgcgacggctttaaacgtcgtaccagctgggattggttgatttaatgtcacttggccatctaatttcgtatccccagctgttgcgggatcaactgtcggggttgccacatcatagttttcgattggattttcagttgatgaatcggcgactatgaccgtcacgttggcacttggtttcgtgaactgaccgtttgttgccacgacttttactgtcacatcgccgacaattaatggatcggtgccgatactaaatttaccggtcgtcgtatccacgtcagcgctgacttctgtcccattcgctaaagttgcgacggccttaaaggttgtgccagctggaatgggttgtgccaatgtcacttggccgtctaatgacgtatcgcctgctgtcgcaggatcaactgtcggggttgccatatcatagttttcgattggattttcaatcggcgcatcagcaactgttaccgtcacgtctgcactcgattttgtatactgtccattagtcgccactactttcacttttaaatcaccggcgactaatggatcggttgtcacgctaaacttgccggtcgttacgtcgacgtcaccactgacttccgtcccatcagctagtgttgcgacggctttaaaggtggtgccgtctgggattggttggtttaatgtcacctgaccatccaatttcgtatcgcctgctgtcgtaggattaaccgttggtgttgccacatcatagttttcaattggatttccagttgaaacatcgctaaccgttgattcaaccgctgtactttcttttgtatattggccgtttgttgccaccacttttgtcgataaaatttgaccggctgttaaagcccccgtatccacgacgaatgtcccatcagcctgcacgcagtcttagttgtgccatcatccagggttacaactgcttcgaaagtggtgccatctggaattggttcttttaaaatgacgttcccagcgactgttgtttgcccagccactggttgggttaccgttggtgttgccacatcataattttcaatcggattagtcgtagtcgttggaaaattcaacgttactgcttccccttcttgctcaatggccgtcaaaatgtctgctgaaattaaggcattattaatcgcagctgctttaaccgtagcagttggtacacccggatcactaactgtggtatgcaaagtaccgctagccgaacctaataaattaccactcaaagcactatctaaaattgtcgacgtgcccccggcaatggcatcaataattgcaaaaagatctgcacttgctttttgaagcgctttcactaatgcctcgataagtatattgtccgaatgaacggctgcgattgcatcccgcaaagtgtcaaataatgccgcataggcttgatgcacataacgaccaaaaccttgcgtaaagtcgactgaaattgttttaccatcaggagaaacgttagcagtaaccgtttcttgataactacctaaatcttgaactttcttaagattattgaaggccgcagcaactgctgggatttttaatgccttatccaatgcagtaatcgctaatcccaacgcatcaaataacggcttaacacctgggatatcacccggggtgattggtaatagatcagcttgaatatcgactgtactaccaccaacaactttaccctgaagcgaagcgggtaaggcgtaaaccaaaacctttttatccgcaacacccactgttgcaacaccttgccccgtataatttaacgataaatcaaagtttccctgtgcattaggggtcatttgcgtccccgttgtcgaggttaaactcgcattttgtaaaatcgagacatcagctaagccggcccgtggattcacctggctcgcttgcgcccgattttgattaatgacaaagacactcgccaccccaacaccactattcagtaataacaacgtgccactacagacatataatgtccgcctaagcaatttcttatgactaacctttttcatttggcaacactcctttcgtatagtttcaacttaacattcacaaaatgcaaaaggtgattttatgcttatggtaattattagttataaaaaaataatacaaaaaagccccgtgactaaatagccacaggcgcttactttaacgctaatatacgaccttcattttaataatactatttttttgcttgttaattattttgctacttttaagagttgcccaatccgtgttttaaactcagctaaaaagcgtggtgtatcaacttggacacagacagctgttctcgtttccggatcatccaaccgggcattgtccccgattgtccgaccacgtgaaggcccttcgacctctgttttcaggttcaacgggaaggttgtcacgagactgggattaattgccaccgcaactgctaatggatcatgtaaggcacaaccatgtaaatgaggtgatgttacttcatacgccttaatataataatcaaccatatcagcatagtctttcgccgcatccgttgcaagttcccgccattcctgggtatccgtcttagtgaagagtgttctgagtgtcacatctaagccgaccatcgtgactggtaacccactcttgaaaagtaaatcagctgcttctggatcttgactaatattagcttccgcatatggcgaaacattcccacaaactgtgagcgcgccacccatgatgacaatttgtcccactttttgaagcgttggtaaatccttttgaattgctaatgctaaattcgtcattgggccagtcgcgacaatgctgagatcagccccatactgttgacaagcagctaatataaaatcaacagctgattgactagcggcatccgcatgcggttgtgttaaatggatttcgccgaccccatcttgcccgtggatttccgcactaattggtaacacgctaaagtcgttagtcgtcttagaatgaccagcccctaaataaacagggatttctggatggcccaataaatgtaagatttgttgactattgacgacacttctttccgtcaaaacattgccatattctgaggtaatgccaattaattcaacttctggtgaacccaatgcgtaggcaatcgccaaagcatcatcaatcccagtatctaaatctaaaatcattttgtgtgtcattttacaactcctcctaaactttgtgaacgcttttttggtactaactttagtgtaccgcattgcgcgaacaacgtaaattctaaactgtaatccaaccgattattcttaaatttgtttaaagttaactaaatcacactaaaattcgggggtattttgattcttttaccgtattatttgttaagctgaactttactatcaattgggaggcaattcattggcaacaatcacgtctaaaatacggatcggactagttttcagtggcctgttagtgctactgaccggctgtggcctacatcaaagcagtcaagcacccgctcgaacctgggaaactaaccaagaagaacaacaacggcaaagtcgcttcattaaaaaaatcggtcaaaatgctaaattggtctatcaaaaaaagcatcaggttttacctagtattattatcgcgcaagccattatcgaatctgactgggggcgcagcgatttagcaaccaaggccaataacctctttggtgttaagggccaataccaagggcagcaaatcctaatgaacaccgatgaatacgagaataatcaacggacaaccattaaagattacttcaaagtttacccttctcttgaaatcgcgattcaagatcacagtgattttctgagtgttggcacttaagcgacactcaccaacctcactaactatgcggaacaagccgacctcttacaaaaagctggctatgccactgatcctaactacgcaactaaaattaaaaaggcaatccaagactatgacttggcggaatatgatgcttaaattagaaaacgcctgatatcggttaattgatatcaggcgttttctaatagaattgacgaaggccacctatttctaggtggccttctaattaatttcgcatattaaattctgacataatgtcggggcgccagtcactaattggcgccgctcaccagtactaaatcgctagcggttaaggcatgttcatatgccggttttatttttgggttaatgcaattatgtctcaattcttgtgtttctaaatattttctcgtttaaacagcgtaagccgcctctttacactacttgtaactccagggttactccagttgattaaagtcttcaaacaatacttgatactacagtgatacgtgctgattaactaataaatagtataacatattttggattaaattgcaccctacataattaatcagtatttaggacttaccatttgaccatagttgacctttgctgtaaaatttggtttatagattattgggaagattgaccaattactttggttaagcccatcttctcagctttatataaggaggcaattcaatgttagtaccgacagttatcgaacaaacatctcgtggcgaacgtgcctacgatatttactctcgtttactaaaagaccggatcatcatgttatctggtgaagtgaacgaccaaatggctaacacaatcattgcgcaattactattcttggatgcgcaagattcagataaggatatttcaatctacatcaattcacctggtggttctgtgacagccggtttggcaatcatggatacaatgaacttcattaaatctgatgttcaaacaatcgctatgggtatggctgcttcaatggccagcgttttactttcagctgggacaaaaggcaaacgttttgcattgcctaactcaacagtcttgattcaccaacctttaggtggtgcacaaggccaacaaactgaaattgaaatcgctgctcgcgaaattttgaagactcggaaacgtttgaaccaaatcttggcagacaattctggtcaaagcttcgaaaaattacaagcagacactgatcgtgataactacatgacagcccaagaagcaaaagattacggtttgattgacgacattatggttaaccaaccaaaatagagtgctgactcaaacgctttgactttgaggattaacaaaaaatggcaattatggtgtttttcaaccatgattgccatttttagtttaaccggaaaagacagtttgaggaagcacgttttcattccggacattacttcaaacaggacacctcaagtttaatccttgtggtgtccttttttgccgcgtatttgctatacttagtttaatacagaggaggttttatgatggatattagtattattaaaagtgatcaagtgacaactgaaggtgggattgtcattggccaccctgaagcacccgtcacatttgttgaatttttgaatttagcttgtccctattgtcgcaaatggttcctcaaatccgaggaacagctcactaaggccgttgaagccggtcaagtacgacgaatcatcaaaccttataacaaggataaagatgatctattaatcggtaacctcgcccatacttacctacccttcgatcaacccgctattgctttaaacgctatccattttctctacacgcatcaaaaaacgtggcgccctgatttatcggattctgaattcgataaatacatgcaggctaaccttaaactaagtccacttgataataccgtacagttagcggccattgttgacgaagctcaagctgccaatatcaaattcgtcccaacaatcatcgctggtgaacacatctttgatgaatcaataacaccagaagaactcgatatgattttacaagctcaataaataaagtgcgcccctgatttactcaaggacgcgctttttaatataaaaagcggtcaaggtcctttacaacaaggattttgaccgcttaatttttgcactcatcgttatttgctttaagcaaatcgatcagtatcagcttgaatagcatttaaatgtttttcgacttcgttcatgctttgacgtaagtcatgatatttgtcgcttgtgaaatctaggtagttgacacagttaccaacacgttcgtaaatttcaagtttttgcgattctgcttgctctgttaatgaaacgtcaacgcgacgttcatcatcagatgcacgcttacgatcaacccaaccatccgcttctaggcgtttcaatagtggtgttaatgtcccactatctaattctaaatggtgacctaattccttaactgacattgtcccatgttcccacaatgctagcattgcgatgaattgtggataagttaagccataaggttttaagacctttccataaaagtggttataagctttctgtgcgcgataaatcgaaaagcataattgctcatctaataatactggtttaatcatatattttcctccccggaaacccgttagtttatagtgtacacaatttaattgtaaaagtcaaattcttgtgcatttattaacgagcatttcttctaaatgactttttgttggtaaccttcagccaattgatttaattttcttaaacgatggttaatccctgattttgagatcgccccactcggcatcttttcaccaagttctttcaaagtaatgtccggaaattccaaccgtaataacgcaatttcccgtaatttcgcgggtaaattatctagccctactgaatcccttaaatactcgatattttcaatctgtttagcagccgcatcaatcgttttatttaaattggctgtttcgcagttaactaaccggttcactgaattacgcatatcacggacaattcgaatgtcttcaaacttcaacatcgcattcgtggcaccaatcacctgtaagaaatcagcaattttttccgcttctttcaaataagtaatgtaaccactgcggcgaaccgttgttttagcgtttagcccaaatctattcatcatccgcacaatatcttgattgtgctcttcatagagtgaataaatctctaagtgatagcggctagtttccggattattaaccgaaccaccagctaaaaaggcccctcttagatatgaacggacgcgctgatcttcatcaatgatatcttctgacactcgtgtatgaattgtaaacccgtcttcagcaacgatgtttaagtcgttcaaaaccatatttgtatcatatttgagtcgtacaatatattgattatttttctttaatttcattttgcgccgaaccaataattctgattcaacttgatagttttgctttaataaactataaatccggcgagcgatcgccggattttcggtttgcacgttcaaaacaaattggtgattcatcaaacttaatgagccattcattctgattaaagcggctagttcagcccgtgcatgttccggatgtacttcgagttgcgttagctctttttttacttcacttgcgtatgaagccatccttattcacctcgcttagttgtattaacctgaaaggcaagattcataatttcacttgcgaccttttgaccattatggaagacgccatgattatcgagctttaagaaattatccgaaatcactcggcaacctagttgtctcagcccatcaaagtcatgttcgactggccataaaatttcatcatatttttgatgatccaaataattagctggcacttggccagtattgacaaggaccgtatccaccacatgttgccctagatgttcattcaaaactcggacatggtcagcatcagtgaagcgttctgtctcacctttttgagtcataatattacaaatataaataatctcggctttggtttgcttaactgcctcaccaagatttttaatcattaaattcggtaaaatgctggtaaacaaacttcctggcccaaggaccacaacatcggctgccataatcgcttcgacaacttcttgaactgcggttggttcctcttgatcattaggatccgtcttcgtcacccaaacgcgcttaatttgcttgcgcgctgcggtaatttcagattcacctgccagttgtgtcccatcttgaaaggccgcatttaacgttaaggccacattagcggccgggtaaacatgcccatcaacagccatcatttctgaaagtcgttgaaccgcatcaaagatgccagattccatttcagaaagcgccgcaatgattaaattaccaattgcatgccctgaaaagaaggcatcatgtgatttaaatctatattgaaaaatatcgagcgttaactgtggtaaatctgataaagccaccaaaacgttccgaatatcaccaggtggcacaacgttaatataatctctgataacaccagatgaaccaccatcgtctgcgaccgttacaatagcggtcgcatccgcattttgttcacgtaaactttttagaataacggggagtcccgtcccaccaccaatcacaaccaccttgggacgacgacctttaatcacccggataatgcgattagtagctgtcatgagcggttcaccgattcctttcgtttcttcatatcacgatgcgtcacatcaactggatagtcaacggctaaatcatccgctaaacgttgtgctaatgcaactgagcgatgttgtccaccggtacagccgattgcaatcgtaacacttgttttaccttctttaagataacctggcatgatacttttcaatagtgctgtcaattgttgataaaatttttctgttgcaggttgttccataacgtaatctcggactggtttatccaacccgtttaacgccttgaattctgcaacataatatggattaggcaaaaagcgcacatccatcacaatatcagcatcaattggcaagccatatttaaacccaaaggacatcacttcgatatgaaatgacggattatcagaggtcttaaagacccggaaaatctgttcccgtaattcgcgaggtgataacattgatgtattaaccaccatttgagattggtttctaatttcagttaataattcacgttccttgtgaatcccatccatcaaacggccattgcgcgcaagtgggtgcgaacgacgcgtttctttgtaacgggaaacaagttcttcatcagaagcatctaagaataaaatcttagttgtgacaaattgagtattatcaagaccagaaagcatctcaataatcccatcataaaaggcgcgtgaacgtaaatcgatcactaacgcgatcttcgttaccttaccggattccttcactaattcccaaaatttgggtaataatgaaggtggcatattatcaacacagaaataacctaaatcttcaaaactctgcattgcgacggttttacccgcaccactcatcccagtaattactactaaattcaacgtatctgtcattagtccccactcctcgaattatcggttattccattgtagcatgcctggtgtgtcattgaaagtaaacatggctataaacattaaaaaagtctaaaacaactgaatgttgttctagacttttcgcatttataagcggcgcgcaattgcaatcacaatcgcattgacaccaacaatcacaaagtaaaaacccaataaagttgtcattgttacagctgcaactactggatgcattaataataacgaaccaacaatcaaccctaaaacgtttaatatgattgatagcatatataagcccatgttaaattgcttcaaatggctcacatttaatagaccaacaaccgcatctaacaagaaccagattgcaaacatataactcattgtgaagatacccgctggaatattaaagatgaataataacccaatcacaatatctaaaatagcattaatcaacatcacggtcgcccggatacccgtatcttgtcttaactggccgtaaacactaattttagccactccccggataattgcagccaccgccacaatgatgactaagccggataatgttgcttggggcttattcaataagaaatacgctccaattaggaaaataatgccggtcattagttctgaccaatcaaagcgccaatcatttcttctaaacatcttaccacctcttcctatctaataaatctatcatactttttttggaagcaatgctcaataactttagtaaaaagaaacccatcaaaaaagctgagcctaaaataggactcagcttcatgactattcttgtgccgctaatgtgcgggcggtatcccgttctaaaattggtttcaagtagcgccccgtatagctttctgcaacgttcactaacgtttcaggtgtgccagtcgcaacgatggtgccacctttgtcaccgccttctggtcctaaatcaatgatataatcagctgttttaatcacatctagattatgttcgatgactaaaaccgtgttgccttcatcaaccaaccgttctagtacgcctaacaaccgtttgatatcatccgtatgcaaaccagttgttggttcgtccaagatatacaaattcttacccgttgattgtttttgcaattcagaagccaatttcatccgttgggcttctccaccagataaggttgttgccgattggcccaatgttacataacctaaaccaacatcgacgattgtttgtagtttacgggcaatcttaggaatattttcgaagaattcagttgcttcagaaacggtcatatccaaaatttcagcaatattcttgcctttgtaaaccacttctaaagtttctgaattataacgactaccatgacaaatttcacaagggacatagacatccggtaagaaattcatttcaatcttgataatcccgtcacccttgcaggcttcacagcgaccgcccttcacattaaaactaaaacggcccttcttgtagcctcgtaacttcgcttcattggtttgggcgaataaatcacggacattatcgaagactccagtataagtggctggattactccgcggtgtccggccaattggactttggtcgatattaatcaacttctcaagattttgataacccgtgatagtcttatactgccccggtttagctgaattacgattcatcttttgcgcaagcgccttcttcaaaatcgtattcactaatgttgatttgcccgatccagaaactccggtcacggcgacaaattcacctaatggaaaatcaaccgttaaatcttttaaattattttcagcagcgccagttacccgcacctttttaccatttccttgacgccgttttaatggtaccggaatataatcctgccccgctaaataacggcctgttaaggaattagggttttgttcgacttccgtgggtgtcccagcggccatcacttctccgccaaggtccccagcacctgggccaatatcaattaggtaatcggctgctcgcatcgtatcttcatcatgttcaaccacgattaaggtgttccctaaatcgcgcatcttcttcaaagaaccgattaaccggtcattatcacgttgatgcaacccaattgaaggttcgtctaagatgtaaagcacgccagataagttcgacccaatttgcgtggccaaacgaatccgttgcgcttccccaccggaaagcgtgccagcagaacgactcaacgtcaaatagtctaagccgacattaatcaagaaagttaggcggtcatgaacttctttcaaaatgggtttcgcaatcacttgatctttttcagaaagttcaaggttatcgaagaatggaaggccatctttgatcgcattgtctgagacttcagcgatatcttggccaccgactttaaccgccaaagcttggcgatttagtcgcttcccgtgacacgtttgacacgttaattccgtcatataagtgcgcatctgcgtccgtgtgaaatcactattcgtttcacgataacgccgatcaatattgctgaggaccccttcaaaaggcacttcaacatcgcgaacgcccccaaaatcattttcataatggaagtggaattctttgccttgtgagccgtttaagatgatatctttttgacgaggtgtcaacttactgaaaggacggtccatatcaattttaaaggccgtgcaagcttgttctaacatttgtgggtagtattgcgaactgattgggttccaaggtgcaatcgccccttcacgcaatgttttacttgtatctgggacaacgaggtccgtatcaacttctagttttaaacctaggccatcacattcaggacaagccccaaatggtgcgttaaatgagaacagccgtggttctaatgccccaaccgtaaagccacagattggacaagcataatgttcagaaaacaagagttgttcgccgtcaatcacatcagctgtcgcataaccgtcagatagtctcaaagccgcttcaaacgaatcaaataaccgtgaccgaacaccgtctttaacgacgattcgatcaacaacaatattgatatcatgtttcttattcttatctaattctaaatccgtgctaacatccattacttcgccatccacttggacacgaacgtagccttcacgctgaatcttctcgaagatttttttgtgttgcccttttttgccacggacaatcggtgacataatttggagtttagtccgttctggtaaagccaatactcggtcaaccatttgttctacggattggctactgatttcagtgccatcatttggacagatgggttgaccaactcgggcccacaataagcgaagatagtcattgatttcagtgactgtcccgactgttgaacgtggattcttagaggtcgtcttttggtcaatcgaaatcgctggacttaacccgtcaattgaatcaacatccggcttatccatttgccctaagaactgacgcgcgtatgctgataaactctcaacatagcgccgttgtccttctgcatataacgtatcaaatgctaaagagctcttcccagaaccagataacccggtgatgaccactaacttatctcttggaatcgtaacgtcgatatcctttaaattatgggcgcgtgcgccgtgaattactatcttatcatttgccatacttgacctctaatctatttcactttttaattctagaatggtatcgcgcaatgtcgccgcttgttcaaaatcaagtttcttagctgctaagcgcatctgttcggatagtcgttcaaccatttctagtttttcagccttcgacatgttctctaaatcaatctcattggtcatcttaatttcttctggatgttcaaccgattgtaccattgaaattgcatcccgaattggtttaataatcgtcttcggtgtgatattgtgggcggcattatattcttcttgaattgtccgtcgacgtttagtctcatcaattgcgtggcgcattgagtctgtaatcttatcggcatacaacaagacttgtccattttcattacgagatgcccggccaatggtttggattaaggaccgttcactacgtaagaagccttccttatccgcatctaaaattgccactaaggacacttcaggcacatcaattccttcccgtaataagttaatcccaattaagacatcgaatttacccagtcgtaaatcacggataatttccgttcgttccaacgtcttgacatcactatgcaagtaccggactttgatgcccagttccttgagataatcggttaaatcttccgacattttcttggttaaagttgtaatgaagacccgttcgttcttttcgatgcggtcattgatttcaccgactaaatcgtcaatctggcccataattggtcgcacttcaatattaggatccaacaggccggttggccgaataatctgatccacttgaatatcggtttgttccgcttcataaggccctggtgtggccgacacatacataatttcattcacgtgctcttcgaattctggcaacgttaaggggcggttatctaacgcacttggtaaccggaaaccatagtcaatcaacatttgtttccgcgcacgatcaccgttgtacatcccccgaatttggggcatagtgacatgggattcatcaatcatcatgatggaatcttttgggaagaaatctagcaacgtgtaaggcggttcgccggcttggcggtcttccatatggcgtgagtaattttcaatcccagaacaataacccatctcttgcatcatttcaaggtcatagtttgtccgttgttcaagacgttgtgcttctagtaacttaccctcgccttttaaaacagctagccgttcggccaattcagctttaatactttcaatggctttttccattttttcatcattcgtcataaaatgcgttgcggggaaaatggcaacgtgtgaccgttcaccaatcacttcacccgttaaagcatccacttcgacaattcgatcaatttcatcgccaaaaaattcaacgcgcagcgcatgatcatcacgagaagctgggaaaatttcaaccacatcaccgcgcactctaaagcgcccccgttgaaaatctatatcgttacgttcaaattgaatatcaactaactgacgtaataggtcgttacgttcaacttccattcctggacgcagtgacaagacgtgattttggtattcacgtggatcccctaacccaaagatacaagaaacagaggccacaacaatcacatcgttgcgttctaataacgaactcgtcgctgaatgccgtagtttatcgatttcatcattaatactcgaatctttttcgatatacgtatcactggaaggcacataggcttctggttggtagtaatcataataactcacgaaatattcaaccgcattgttagggaaaaactgcttaaattccgcgtacagttgaccggccaatgtcttattatgcgaaataatcaacgttggtttgttgagattcttaatcacgttggacattgtaaaagttttcccggtcccagtagcgcccatcaagacctgtgccttagcacctgcctcaaaattcttcgttaaggtttcaattgcagcaggttgatcgccagcaggttcatatggtgcgactaagtcaaataggttatcgttctgtctatcaatcatgaattgcctccagtgccgttttattgcgataaaagaagcgcctgatacaaaacggggttttgtaccagacaccttcttaaatgacgcatttataagttgtcagtgatcatctgcgcgtggtgcttaagccactgaacagatgccctcttttttatcaattaccattctaacataccgaacgtattttcgccacactagtgaactagcctagtttgacaacgtttggcgcaccaattgcgtgagcttgccgcggtcggcaaaatcctcactcaataggtctggcaacatttttcggatgaaatattgtgcgctcgacaaattttgatattgcataatcgttttcaagctttctgcaaaaatttccaaaaaggcattctctggattccccttttcaatctcgccaaatgattcataaagcaaatcaatcttatcagcaactgccaataattggccttccaaagtttcgtctttcccttcactcaagcgccgtttatagcgttcttgtaaaaaaccgggaatttcattattgatgaagttatccgttaaagaactttcgacattggctaacatcgtccgtaactcgtgcgtcgcatatttaaccggcgttttgatgtccccaataaaacgctccgtataatcatgattcaacgcccgttcgtataagacttgccaattgattggttggccgttttcttcttcgatatcgcctagtaactgcgcaatctcgcaaactttaaatgaatgcgctgcgacggaatgttcctgatacttaaataatcctggtgcccggtttagtgtctccaaattatttaacccttgcaaatactgatgcatacccattcgaaaaaagcctccattcttacaaaaatagaccgactaacgatatagtccgcctatttgttgcacttattatagataaattccgcgtcaatgtaaaatagtaaccctttttatgaggattttgttatttaacaagggcttggattgctttttcaaagttagctaatttcaaatcagccgttgcttcatcgtcagcacaagtcccaacgtagaatttaaccttaggttctgtgccacttggccgaattgcgatccatgtgccatcttctaagtgatatttcaaaacgtttgatgttggtaaattgattggttcagtgtgaccatcagcaaatgtttgcgtttgtgtttggaagtcttctgctgaagcgactttgatgccggcaaaatcaacaggactttcttcacgacatttaaccattaagtcagccatttgttgtgggccgttgacgccttcaaaatcaatcgctgtcgtttgttcagcatagtagccatattcagcgtatagttcttgaataccgtcgtacaacgtcttaccgtttgatttgtaataagctgcaacttcagctaataggaccagcgtttggatggcatccttatcacggacaaatggtttaactaagtaaccgtaactttcttcaaaaccaaacatgaaggtattttcgtttgtatcttcaaaatgttggatttgttctgcaataaacttgaagcctgttaagacgtcaatcattttaacattataactagcagcaatctttgttgctaattccgttgaaacgattgatttaaccgcagcagcgtttgctggcaatgtgcctgcatctttacttgcttgtaaaatatagcgaagtaaaacagatgcgatttggttccctgtcattaattggtagctaccatctggttggcgtacggcggccccaagacgatcggcatctggatcagtcgcaattaaaaggtctgctttttgcgattttccaagttcgatagccatatcaaaagtttgcggaaattctgggttagggaatggtgttgttgcaaattctggatcagcaacggcttgttcagccaccattgtgaattgttcgaagccagcttgacgtaaagcgcgttcgccaaggactttcccagtaccatgaagtggtgtgtaaattaatgacattgttttaccaacagtatccactaattcttggttgatcgttacttttttaacttctgctaaataagcttgatcgacattttcgccaattaaagccatgatgccggcttcgcgtaaggccatttcatcagcaacttcaattgcaaataggtctgatacctgacggatgtagcttgtaatcatatcagattccttaggtggcatttgagcgccatcttcgccgtaaatcttgtagccgttgtattgcttaggattgtggctagcggtaatcatgattcctgcataagtatgtaggtgacggaccgtaaatgataattcaggtgttggacgcaaagcatcaaaaacgaatgttggaatttgatgttggcctaaaacgcgtgctgcttcgtgtgcaaaagtttctgattggtaacgtgaatcaaaactaatcgcaaccccacgttttttagttgcttctggtaaagtttccatgaattgggcaaggccttctgttgcttgacgaactgtataaatattcatgcagttaatcccagggcctaagagaccacgcataccagctgtcccgaattccattggcacactgaaggctttttcaagcgcttcttcatcgtttgccatattgtctaaagcttctcttaaaggtaagtccatttttgtttgattattccaaattgcataattatcttgccagctcattttgtaacccccacatttgttataaaatctcccactaattatagcataatcaaccgctttcccatagggcctcaagtgttaagaaacttaaaaaaagcgccaatccattttttatggaccggcgctttcattggtatagctcatttaaacattatttaaatactttgaatatatttgaagacttcttggccggctatgccgccgtcaccgactgctgttgtgatttgacgtaagtccttttcacgaacatcaccgattgcaaaaatcccggggacactagttgccatgtggtcgtctgttttaacccaaccggcttccgttaaaatacctaggtctttgaaagcacttgtcattgggtcaataccgacgtagatgaagacaccacttgctgggacttctttagtttcgccactttccttatcaacataagtgacagcagctacttttttatcgtcgccttcaattgttttaacttgtgcattccagacaaaagccatcttatcgttagcaaatgcgcgatcttgtaaaatcttttgcgcacgtagttgatcacggcggtgaataacggttactttgctagctaattgtgttaaataaaggccttcttcaatcgctgaatcaccgccaccgatgacaacgacttccttgttcttgaagaacgcaccatcacagacggcacaatatgaaacacctcggccaccgtattcatcttcgccaggaatcccgattttcttatgttcagaacccgttgcaataatcacagcccgtgcttggaagtcgccttcatccgtgtggactaacttaaactcacctttgtcttcgatgctattaacggtgccataaccgtattcagcaccaaattgtgtggcactcgcatacattttttcgcccaattctgggcccaaaattgacttaaagccaggatagttttcgacctctgctgtattgttcatttgaccaccataaattcctcggtccaacattaaaacagataggttcgaacgtgatgcataaagcgccgccgtcatcccgccggggccagcaccgattacaattacatcataacttttagccatttcgcataatctccttacttttatcaagttacttctaatagagtgtatcttacccgttattaaaaaaaaagtccaccaaactgtttgaccagtcggcgaactttctgtaatgctaattaacctttaatttgtttcaattcttgtaatagttcggttgcctcagcttcaaaagctgagtcatcactttgtagataggcttttgccaattgatagctctcttgcatctgccctaaaaaagcgtacgccgttgctaaaaaatactgtaattccggatgtgtctggtaattgacgcttggaatttcttccaatgcaatcacagcaccgcggtaattaccgaccgattctaaacaaattgctaattggcaaaccacaaagatgtaatcatccttcgtttttgccaatgacttagagcgttgcaagcacgtgagcgctttttcataatgaaatcgctcaaatgcttgcatccctctgtcaaaataaaattcacaagttggtcttacagataccaaatcgcccataaagtaatcggttctcctttagtcattttatcaacttatgtcatcataacatattcgttttgcggatgcgatacccgtttaaaatgatggcgtttttatcaaataatttaattggtctatttaaaatcgatttctggtttaccagaacgttgcattaaattgccaatttcggtgcgaatgtcacaaccacgataaaggacgttgtaaattgcgttggtaattggcatatcaactgagcgttgttgtgctaattcataagcggccttacatgttgcgaccccttcaacaaccatgcccatattttctagaacatcatctaacttttgaccttcgcctagagcattccctgttcgccagttccgtgaatgcacactggtcccagtaacgatgagatcgccgacaccagataaaccgatgaacgttagtgggttagcacccatggcaacccctaaacgagaaatttcggctaggccccgtgtcattaaagcagccttcgtgttatcgccataacccaagccgtgtagtgcacctgcgcctaaagcaattacgtttttcaaagccgcacccatttcaacaccgatgacatccgtattcgtgtaaaggcggaagtaatcgttcatgaagatttcttgaatccattgggcttgcactaaatcagttgaagcagccgttaaagttgtaatatccttcattgcaacgtcttcagcatgactaggacctgataagaccacgatgccatttctaacatctgccggaatagtttcagttaaaacttctgaaattcgtttatgactcccttgttccaaccctttagaagctgtgacaatcacgggtttaacccctttggcttctagcactggtacgatttgttctgccactagacgaatcacttgcgttggaataacgaataaaacaacgtccactgcttcaaacgcttcgtttaaatctaaagttgcgtgtaagcgtggatcaatcttgaattcgggtaaataatgcttgttagtgtgttgttcgttaatctctgctactttctcaggatcattcccccataattcaacgtggtggccattttctactaataagttggctaaaattgtgccccatgaaccggcacctaaaactgcaacattaactgtcattaatcctaattctccttttatttaactgctgagcgcagtgtattaccttctaaatagtcgggtaacgtctgttgtttacggcgccagatccacagccccatcgcaccaaagaacaacacgagtgatagaatctgtgacacacgtaatggtccgataaataaactatcggtccgcatcccttcaacgaaaaagcggccaaaggcgtaccaagcgatatagctcaataaaatttcaccttgtttaaaccaaccttgacgatgacggccactcataatgattataaaccctaaaacattccaagtcgattcatataagaaagttggttggcgataagccccatcaatcaacatctgatcagtcacccaattgggcaaatgaagtttctgtaagaagtgcaacgtcgttttagccccgaaggcctcttgattcataaaattcccccagcgaccaattgcttgggcaatcatgaccgttggtgccgcgatgtccaaaactaaccacggcgacaagaaatgcttgcgacaatagatgatgaacacaattgttgcggcaattaaaccaccataaatcgcaatcccaccgtgccaaattttaataatttcacttggattggcttggtaataggaccattcaaaaatcacataatacagccgtgccccaatcaaagcaaacggtaatgcccataaaattaaattcaaaatatcatcttcactgacattgcggcgcttagcttctcgcaaggccaacacaacggccaatacgacaccactagcaataatcacgccgtaccaatgaatcgccaacggccctaattgtagggcaatcggatttaaaacacctaatattaggttcacgataatcgctcctcatattcaattaaaaaaactagattgagtactatcctgtctttataacagtatagctcaatctagtcagatgacctactatattaaggtacttttaacgtttaaattagttttcgtcgtcagaattagactcgattaacttgcctaagttcgcttcgaaagtcttcgttgcatcatagcccattgatttggctctaaagttcattgctgcaacttcaatgatgatggccaagttacgaccaaccttaacgggcacagtgatcttaggtactgggacatcgaaaatcatttgttcttctgtatcggaaccaagacgatcgtacttcttatcttgtgaccagttttgtaaatgaacaatcaatgaaattgatgtatcagcccgtacagcaccagccccaaagaggttcatgacatcgataatgccaatcccccgaatttcaagtaagtgccgcaaaatcattggtgcttcaccaacaaccgtccgttcatcttgttgataaacatcaactcgatcatccgcgattaaacgatggccccgtttaaccaattcaagtgctgtttcactcttcccaacaccagaatcgcctgtgatgagcacccctaaaccgtagatatcaaccaggacaccgtgcattgagcgccgttcagccaattgaccatctaaataatccgtcactaaacttgaaagacgggttgttgataggtttgatcctaacactggaatcccagattcttcagctgcttgtaacatttccttaggtggttctaaactacgcgaaattaagaaacaaggcgtattttcagaagccatccgccgcataatcattaagcgttcttccgccgtcatgttttgcgtaaaggaaacttccgtcatcccaaataattgaattcgttcatatgggtaataattaaaataaccggttaattcgagtccaggacgagagatatcactcaacgtcactattttctcttttaaatgagcttcccctgagtacacttgtaacttaaggtccgtcactaatctttccattgaaacactatccgccatgatataccgtcctttttctactcttatacgtactatcatattgcttttggatacatttttcaacatcaatgtaggcgttttcttaaattaatctaaaaataaagcctgccatcaaaattctgatgcaggctttatcattaataacactctctgctaaattgattgccaatgatcgtattggcaatcgataggatgaatgccacgacaatcgccgcgcctaatccagaaaagccaaacgtaacgttcgggaaggtgctccctgaactgacgaagattgacgttaattccaacataatcccgttaatcactaagctgaaaaggccgagtgttaaaaacgtaattggaaatgagaggatatgcaaaatgggttttactagcacgtttaaaattgataagacaatacttgccactaaggcgactaaaataccgtcaacatgaaacagtcctggtagtaagcccgaaattgcgataaataagattgtattcactaaaacgcgtgtccaatagcgcattaaaaatcactccagttgtcatcatcgaccttcacatcacgtgcttccttacggccacgagaatcgctcggttggctgtaacaggcttgatgttgttcgtggtaatggtgacgtggtttattataaccgacaattaagcggtaaatgagccagatcactagtaacggaattgcgaacttgaagagaatcatcactgaaccaatcaggacgcccattaccgtaatggcgagaataatcgccaaaattgggactagtattaatagaaaaggcattaatattcactccattcatcatgagaatcgcgacgcgtttgacttggccgttccggaataacgagggccaagataatatagacgacaatccctgggaaagctgctgagaagaatgagaataaacagtagagcactcgaaccaatgtcgcgtcaacattgaagtattctgctatcccacccattacaccggaaatcatccggttatctcttgatttatataatctcttttgtgccattattcagaaaccaccattcattattttttagttttcattgtcttttaataagatattaccagttgttgtgcctaatgttaattgggctgcttgcatatcttcgtttcgtgctaattgtaacatttggctccctgtgctttggtgttgatcaaccgtttgcgcattggctagccggtttttgatcatcccaaaacgtgtgcgagcttcaagtgtaaagccaattgtttgtggtaaggctaacttaaccgtaccattaaccgacttagctttcaaatgttgtaactgattatcgttgaaagaagctttgatatcgccgttaacagttgaaacactactatttagcacttgggctttcatcacgatattaccgttgacggttgtccctagaatatcttcatagtggccatcagtaacagtaatcccgccattaacgttttctgcttctaacattgcgacatccgtactgttcaatgtcaattggccatttgacgttttaaggtatagatcacgtcctgtgaacccatctaacgcaatatcgccgtttaataacttaacgttggtttgtaagtaattattagctggtaggtagaatgttaagtccgcttgaatgcgtttgttagggacttggaagaccaagtcagcatctgttacattgatattgctacgggcttcaaaagcttcgcgggctgttggttcacccatcttaccataaagtttgacttgggccacaactttaatttcgggttgatcccaaatcttgaaatcgacgttcccgttggctactttgacgttaatcatttctggtgtcacgtctgagtaaataaattcatgcgtgaatttttcggttgccaaacctggcaccttgaagttaacttctttccagtcaacgttatccatcacgtttttagcagtttccttcatgagtttaccgagatgtaggcttgcttcgcctaaacgaccgctgatttcatcgaatgtttcgctggcattttctttccaatcatctgaaaggcctagcttttcagaccattgattcttcgccatctgccgacgttgcttttcaatttgatttaattcttccgttaatgtttgccgttgttcttccaagtcatcaatttgagcttgattttgtaaaacagctgttttgagtgcttggcgttcagccgccttttcacttgtcagactatctaaatcttccattgtatccagcacagtcacttgttcttggtcggcttgaattttttgcttcaagtcttgtaactggcggttaacacctgatagcgcaattgttaattctctggcgcgttcttcaacgatcgcgcgttgatcagtttctggtgccgattcttgttcgttatcatcaacatcagggacttctggttctgctgacattttagttgtattttgatcgtttttagctaaattttctaataagattaaggcttctgaagatgttaatacaccttggttcactaagtctaaaattctttgacgttcattcattgttatgacctccgttggtttaaatgatgacctctatatctgtcacacttgactatggttctattatgcccattttaattggaaatgtcataggtccaaaggttgatttttatttaggtactccgagcgatactcagttgggacataaaaaagaccgggcgattggggcccggtcctttactacaattagattctagtttttaattgcgccagcatatccttagtcattgcttctaaatcatattggggttcaaaatcccattccgctttggcgcaactcgcgtcaatttggttaggccatgagtccgcaatcgcttgacgcgctggatcaacagcgtaagtcatttcaaagtctggcagttctttttgaatcgcagctttaatttgttctggttcaaaagacattgccgtaatgttaaaagcgtttcgatgaatcaagcgttctggatcggcatttattaatttaatgatggccccgatggcatctggcatatacatcatatccatataggtcccttctttaatgaatgattcatagtagcctttgcgtaaagcttcatagtagatatcaactgcataatcggtcgtcccgccgcctggcaacgtcttataagaaatcaaccctggaaaacggacgccccgtgtatcaacgccgtatttagtatgatagtaatcacaaagcaattctccagagactttagtcaccccatacatcgttgttggtcgttgaatcgtatcttgcggtgtattatctttaggtgtgctagggccaaatgccccaattgaacttggtgtaaagaatttcaaatctaattcacgggcaacctccaatgcattgacgaggccggtcatattcaactgccaagcaaattgtggccgttcttcagccactgctgatagtaatgccgctagatgaatgagtgtatcgacttgataatcagttgcaattttaagcattcgatcataatctgtcacgtctaacacttcaaacgggccactttcaaccgtttcgttatggtctggtcggcgaatatccgttgcaatcacactatcgacaccgttttgcgctctcaattgagcccctaattctgatccgatttgtcctaaacaacccgttaccatcactttatgcatgttagttcctcctttgaatttagataatccctagttcgcgacccactttttcatacaccgtcactgcctcatctaacattgctttagtgtgcgtagcacttggcatgttacgaatccgccccgttcctaatggtacggttggaaagacgattggtttggcataaacaccatttgcaaccaatgcttgcgagaatttttgggttaattgttcatcgcctaaaattaccggtgtaattggtgtttccgattttgcgactttaaagccaaccgcttttaatttagccttgaagtaatcggcattctcccataactgatcaacatattcgggatgggccatgattaagtctaacgctgtgatacaagcagccactgaaccaggcgttaatgatgttgagaacaggaatgggcgcccccgaaccttcaaccaatcgattaatgcttgagtccccgcaacatacccccctacaacgccgattgctttggagagcgtccccatttggaaatcaatcttatcttgtaagccgaaatgcttaacagtgcctttcccatgccccatcacaccagagccatgcgcatcatcaacgtaagtaatcagttgatacttctcagcgattttaacggcttcgggtaaattggccacatcaccgtccattgaaaagacaccatcggtaatgtacatcactttttcgtaaagaccactttcagttgccgtctttgctttttcttctaaatctgccatatcttgatgcttgatacgaatgatcttcgcccctgatagccggcacccatcgataattgacgcgtgatttaattcatctgaaagaatcgcatcattcttagtcatgactactgaaatcacgcccatattacaattgaaaccagatcgttctttttatctaaattaacaaagcgctatttaacggggtcaattataagaaggtcattaaaaaagcccgtccgaattatgataattcggacgggcttttttaatttgaaaacaattgcttaaacgatcttaccggggtaaggttcgcccgctacaaattggaaatctaaggtttctaattcattaatatctgttacacacttgctaatccctttagctaacattaagttaatcggattttcttgcaaatcatcttcacaaacaaatacgattggtgtatggcttgcattaaggtaaccgacttcaaaagcggtccccgtatcttcatcagccatatcccataagacaaccgccaaatccgctaagtccattgcggtaatgtcattttgataagtttgattggcccattcgtaaccaccgaataaaccatgaggatcattatcttcagtgacatctttgtattgatgttcttgcggactatggatatagccaacggtcggattagcagccaacgctttatgggcgcgcgccaccatatctgcttgtttaggggtgaaccagccacctgctaagtaaatttgtttttgcattattacgactcctctttattaaacattaaaaaggggtgggacaaaattgcttttgtctaccgccccttttttcgattggcgaatatgatttttttaacgtgcttttttagtctagtttccgccgcttaaccctactgagcagacttaaacgcactctcttcttaaacgtgttttatcagccatattctatgctaatcctcagaatatatccggctggtacaacactcttttaaaattcgtcttctttgtcgtttgaatttaattcgacgactttaccggttcttaagtaaacaatccattcacagatgtttgtgacgtaatcaccaattcgttccaagtaactggcaacaagcatgtaatccatgctgccaacaactgtttctgaatcacgttgcatttctttaacacagtcatcgtaaatgttttccgaataagcgttaattgctgtatcttcttcagcaatggcaattgctcggcgccggtcctctttaacgtaggcatccaagacttcttctaccatttgttttactttgtcggccatatctgcaatatctttttcaatatctggtacacgggtattgcccttcacacgaatcgttgatttagcgattgataccgcgtgatcgcccattcgttccaaatcagaactagccttcatgatggttacgataattcgtaaatcagtcgatacgggttgttgaagtgcaattaattcgaaactcttacgttccaaatccgtttcccgttcattaatcttgtgatcatcggcaatcacttctcttgctaattgcttatcgtgattaatgaaggctttaacagatttatagatggcttcattgaccatcatgcccatttcggaaaaacgaacgtgcagttcattcaattcatcttcaaaaagtctacgcatgctattcccttctttcttagccaaaacggccactgatataatcttccgtttctttttcggttgggtttaagaagattttcttcgttggtgcatattcaattaattcaccttgtaaaaagaatgctgtcttatccgaaatacgagaagcctgatgcatattatgcgtcaccattataatggtatactgttggcgcaattctagcaacatattttcgatttttgtactcgaaattgggtccagtgcggatgttggttcgtccattaagatcactttaggcttaacagcaagtacccgggcgatgcagacccgttgttgttgcccacctgaaagtgacaaagcactttcgtggagcttatctttcacgtcatcccaaacggcagcttgtttcaaactggtttcaactgcttcgtccaaaacgcggtgatccttcacgcctgataaacgtaacccgtaaacaacattatcgtaaattgaaaatgggaatggattaggttgttggaaaaccatcccaacttccttccgtaatttaacggtatccatctcaggcgcataaatatcctgaccattaagcaaaaacttgcccgtcaccgttgcggaatcaatcaaatcgttcatccggtttaaacaccgcagatacgttgacttaccacaaccagaaggcccaattaacgccgtaatttcattttctgcaaaatccatattaatgccttttaaggcctcatttttaccatagaacaaatgaacatctgaggattcaataattttattcgccaactggcaaacctccttgtatgctagccgaaatgaccagacacataatcttctgccgctttaatcttaggccgggtaaacatcttccgggtttcatcaaattcaagcgcgtgccctgaatggaaaaaggctgtgtaatcactaatccgcgctgcttgttgcatgttatgcgtcacaatgacaattgtatattgttctttcaagcgaattaacgtttcttcaacggtgtttgttgagatgggatccaaagccgaagccggttcatccatcaatagaatatcaggtttcatcgcgattgcgcgtgcgatacaaagccgttgttgttgcccgcctgataaagccaaggcactcttatttaatgaatctttcacttgatcccaaagtgcagcttgtttcagcgttgtttcgacgatttcatcaaggtactttttatctttttgaccatgttgtttcaaggcaaacgtaatgttatcgtaaatggatttagcaaacggattagggcgttggaaaaccatcccaatatgttcgcgcatcttataaacgtcaacttcatcactattgatatcaacatcccgatacataatcttcccggtcacacgagtattagcgatattatcgttcatccggtttaaactccggagatacgttgatttacctgagccagaagccccaattaacgccgtaatccgataacgttcaaattgtaatgacgcatcgtgcatcgcgcgtttgtcaccatagtagacgtttaagtcttcagttgacaacgcaatttcatgtttaggttctgctaattttttgatatgtgtttttgttaaatcataatctgccataaacttctcctatgctgctgtcattttgcggtaaacgcgcttgccgattacccgtgctaaccagttgaataataggacagcgataatcaagacggccgatgcaccagctgaaacagctgtcgcatccggcataatgccttcagaattaatcttccaaatatgcacagccaatgtttcagctggacgcattggattcaaaggacttgcgatatacgttggattccagttcgtgaaatctaatgaaggcgcactttgacctgctgtgtaaattaaagcagcggcttcaccgaaaatccggccggctcctaaaatcatcccagtaataatattgggtaacgcttcaggaataatgacgtgtttaactgtttcataacgtgataaaccaagcgcaaggcccgcttcacgttgggtaaagtgaattgatttcaaagcatcttcaacgttccgtgttaacaatggtaagttaaagacggttaaggccaaggccccagctaaaattgaaaagcctaatttaaattgaataacgaagactaagaaaccaaacaaaccaaccacgactgatggtaaagagcttaaaacttcaattgccgtccggacgacatttgtcacccagtttttaggcgcgtattcagcgaggtaaatcccagcaccaattgaaagtggtacggaaatcaccatcgcaattaccaataggtagaatgaattaaagagttgaacgccaatcccgccgccttttgtaaaggttgacgctgggttcgtcaagaattgccaagtcacatgcggtaacccacgaattaagatataacctagtaaacttgccaataataaaacaattaagccagcgattagtgttaaaacgccggttgcaactttatcccatttttttgcatccattagcgacccattgctcccttccgaccaattaaacgaactaataagttaaataatagtgacattaataataagagcagtgccaatgaccataaggcgttattggcaagtgagcccataacggtgttcccaattcccattgtcaagacactggttaatgttgaggctggtgaaatcaagttatgtggcattaaggccgcattcccgatcaccatttgaacggcaagtgcttcaccaaacgcccgtgccatcccgaagacaaccccggttaaaatccctggtgtcgctgcttttaaaacaaccttccaagttgtttgccaacgcgttgcccctagcgccaatgatgcttcccgatagtgccgtggcacactcttcaaagcgtcgacggtcattgaagtcaccgttggtaaaatcatgatgaacaacacacaggttccggctaaaatcccaaaaccactgccgccaaagatatggcgcattgttgggacaactactgataacccgataaaaccataaacaacagatggaatcccaaccagtaattccataacaggttgtaaaatcttttccccccgtttaggtgaaatttctgtcatgaaaatcccggcgccaatggcaaatggtgttgccaataaggctgccaagaacgtcacgccaaacgagcccataatcattgggagcgccccaacttctggccgaccatgactatccttaagacttggattccaatcgctttgcgttaaaaagcgccataggctgaccttatccttaaagaaggttgcgagtcctttagaagccacaaagtaaaaaatagccagaacgataaaaacgattaaactgatacacaataaactgattaattttccacggctttcggttttcgccgcccgtgattttttcagtaaacttgccttaattggatccatttttgccacctacttaaccttcgtaattgtgccgtctaacgaccgttcaacttgcatttgtgcgactgggatgtaacccattttgctaacttgtttattttgaatcttatccgataaaacataggccaagaattccttggttaatcccgttggttgacctttagtgtaaacatgttcgtatgaccagattggccaagtgttattcataacgttttgatcatctggtgcaacaccatccagtttaagcgttgcaaccgtgttatccacataagaaaaggctagataactaatcgccccgggtgtattggccacaattgaacggaccatcccagttgaatcttgttcttgcgctggttttgtcttgcgattacccatcacccattgttcaaaggttgaacgagtaccgctaccttgtgctcggttaaccaagactacttcttgatcaggaccaccaacttgctgccagttcgtaatttcgccgctaaagattctagctaactgcgtcagcgataaattcttaacgccaatttttttattaatgactggtgtaataccaacaacagccactttatgatcgactaatttgcccgctttaatgccagctttttcttctgcgaataaatcagaattacccatttgaacggcgccttcttgaatctggcttaaaccagtcccagaaccgccaccttgaacgttaataaactgacctgaatgttgggcactgtattgttcggctaacgcttcaatcagtggctgtaaggccgatgacccaactgccgtgactgattgcccattttgtttagattgacaaccagttaatagtaatacaacgaatgtgactaataagccaataacactacgtttacgcatgctaatcctccacgaattccatttaaaccctttgattaattatagaaaagaattgtaaaatctaacactattgaatgtaaatattttgtaaatcacgttaaggggaaggttaaaataaactgactaccgacccctaattggctttcaaccgtcaattgcccaccaatactttcggtaatttccttggcaatcgctaagcctaacccagtcccactcttatgtgtcgcccgagcctgatcaacgcgatagaaccgttcaaaaatccgttcttgtaaatcacttggaatacctaatcctgaatcaacaactcggattatcaattgttgatgatcgacttgagccgcaatcacaagagaccccgcttgtttattataggtgataccgttggcaatcaaattcttcaagacttggtttaacttcattttttgcgtcttaaacgtcaacgtctctggtatattgacggaaacgtgaatttctttttgttgaatcttttgttgcatcaattctaggttagcttcaactatcgcttttaacccaatatcttgcgcttgcgtttgatcttggcgatccaagtgtgataacgccaaaatatcctgaattaaggctgtcaggcgcgtgctttcttcgtaaataatcttcaagaactgctgtaaagtttccggatcatccttggcccctgccaacagcgtttcagcaaagcctgtaattgccgtcaccggtgtcttcaattcatgactgacgttgctaacaaagtcgagttgcatctgttcaactcggcgaatatcagttaaatcatacaagatcactaacgcctgaaatttagacttcacggtatttaactgaactacattggcatcgacaaatcgttcccgattctgaatgagttgaatctcttgatggtgactgcgccgataacggaaagtatgttcaatcatccgcgttaattcataagtcttaatatcatcgatatacgggtgcttctgaggctcgattgcggtttctaataactgccccatcgcctcgttatgcaaaacaacttggcgattttcattaatcaccattactccgaccggtaaatgatcaatcaaccgatcaaagctgccttgttggatggcaatcttttgacgcatgtgacgcatatccttgtttaattggttcacttcgtgtgcgaggacgtataatgacgcgtccttttggaaaataattggttctggcgtttcttcgtagcgaatatgatgaatattggccaccaaaatcttcaagtgctcgtaaaaatggctgcgttgccgtttaaattgccagagaacaatcagactaaacagtagatacaaaatagtcactgtcagggcgatttccggccaggtatgccagaagcgttgttgtggcatcaataagacaaacgttggctgactcgattgatgaaccgcaactaaataccaacggccatcaatcttttgcctaacactaaaattgcgcgtggtatgatcacgatttaaaacatcggccactgaccgttccaacttggtgtgctgtggcgactgtgaagtcacaacttgtaatttattttgttgcagccatttttggcgcttaaagtcggcgtctttcacaattaaagcgtaatcgtcacgccgttctttgagtgtcgcactttgctggcgataaatgactaaattaatgagcaaaataaaggctatgtaaatagccactaaaatagtggctagcttataaaatctcacttgatcatgcttggtcatgtgcgggatcctccaattgataaccaaaaccacgaactgttttcagataaacagggtggcgcggatcatcttcaatcttttcacgcaaatgactcacttgaatgtccaccattcgggtttcagctgggtagtcgaatccccaaacggcatttaataatttttcacgactttgcaccttattgagtcgatgcataaaatacactaataattcgaattctttcggcgttaagtgcaacttatgatcgcctttttttgcgattacttcggtttcgtccacacttaaatcaccgaccacaatcgtttcagacgcctgttcaacgggttgttcgattggttgagcggtccggcgttcaatggctcgaattcgagcgatgatttcgcgggggctaaaaggtttcgtcacgtaatcgtcggccccaacttcaagcccaacaatcttatccgtttcgttgtccttagccgttaaaatcataattggcgtttttaatttagcttcccgaatctttttcgttaccgcaatcccatctaatttgggtaacatcaaatccaaaatgataaaatcaaatttttgctgtaaggccatcgttagcgcttgggcgccatccgttgccgtcattaccttgaaatgttcttgctccagattatatctcaacagtgtcaagattgctggttcatcgtctaccactagaatcgttttcatcaatgtcatccttctctaattaattctctggaaataaaataacacctaattcgtggggtgcatcggcaaaaactgcactttccgtaatgcgatattcaccctgaagatcttgaactttcaaatgacaataagtcgaatggctttgaatcgcttgatagaaattttcattgtttgaaattgcttgaccattacattccacaatcacgtccccagcttctaaccccattttagcagctggtgtttgttcgagaacccccaaaatacgaatacccgcatacggttttgtaaaatgttgcttatttgcccggctttgtcgtctcaatcgccattgtaagataaaacagataatcaacgcaacacttaatgtgctcaatatgatgcttgggaatataaagctaacgataccggcaaccacaattacaccaccaaatgtgatttgcgttcgcaaatcacgcgtcactaacgctgacatcaattctttaatcgctttaactgaaaagccgagaatcaacggtaagatgacgatgttaaatgattgctgaccaatatgtaggactggccaaaagccccaatcaggtaactgattagtgcctggtactaaaaagaaaacgggtgctaagtagatttgacggctcgtaaacatcgctgtcatccgcccccgactgctagtgatgacgtgtggtgtcaccaccttagtggcatcccacttttgtaaaaagccagttaggattgtaattaagcctgctacaattaacagttctgctagcaaactattacccgctagaatttgatattgtggccaaatcattgcactgattaaatacaataaagcacttaatagtattaagacgttacccgcaaaaccaattggcatcaaaaataaggctactaccgcgacaatttggtagactaaccaccaatttaaattaattgtgacgcctaacaacaaggtacaacaactgagcgctaaacccgctaataacccgtgccaccaaaatagtttcaactctggccacttaggattaacggcaattctaaacgtctgtcgttcatgtttgatacgatgtagcgctaaccaaaaagcaaacacaatcgccacccataacaatggtgtcgtgaaaaaggtaagcaacatattaacgaacatctccattaaataaaccctccaacctattcaatcccgccaacctgaaaacgatgccaatcgcatctgtcgaacagaccgccgaactttccccataagtatagcattttgccccgttaactgcctagcccttaaaaacgctaaaaaaggaaccccggctaaaaagctgagattcctttttgtaaatcagtatgattacttgttagatttttaagaaacgacgcattgaaacgactgatcccaaggccccgataacaatccctaaaatagccattgttaaatcgagttggaataagaacatgcctggtcgtaagagtgagtaaccggcagaagccatgctgagggccatatgattataaacccagacataaccaaaatcgattacgataaccggaacaattacccctaataacccggtccaagccccttcaaagaggaatggccagcgaatataggcattagttgccccaactaaacgcataatcccgatttcgtcacgccgtgataaaatcgtaatccgaatcgtatttgagattaagaagacagctacgaataagagtaacgctgcaaagcctaagccccatttgcggatattcttcatcacgctaaagagtttcttagcattattaccaccataagtagcgtcgtaaacgtgcgctaatttcttagcctttttagcgaccccaatcgttttattgggattcgttgtgctgaccatataaacatcataaagtggattatcgtcgccggtaaacatcttgaatgattggccgtaactaccaaccaccttattcaattcttttttccgacttgaataagtgacttttttgacggacgccatttttttaagtttcttttctaactggtttttctggtcgttggttgtaccacgttcaaccattacccggacgtgcacgtcattttcgatatcatttgaaattttattaaaattaaaaatcatcgcaaaaacaacgccgaccaatagtaatgtgactgtaacagcactgacagcagcgactgacatccagccattacgctttaaactcttaaaactatcatttaaatggcgcttcaacgttctaatcttcatagccatactcaccttctttttcatcccggactaaacgaccatcttcaatcgctaagacacgatgcgtccgttcgttaaccatttgtctgttatgagtcgccattaaaacaattgtttctttattgttgatggcttctaaaatatccataatgccttctgacgtttctggatctaagttcccagttggttcatcagcaattaagacttctggatagttgacaattgcccgtgcaacagcaactcgttgttgttccccaccagataattcgttagggaagcgatcatttttggcttttagacccactaattcaagcacttcaagtactcgtttttggatgacttcgggttcagcttcaatgacttccattgcgtaagcgacattttcaaaaactgtcaatcgtggcaataatttgaaatcttggaaaaccacaccgactttacggcgtaaataagggacttcccgatctttcatgttcactaaatcaaaaccagccacttcaatttcaccactggtggcctttaattgatgatataacatcttaataaatgttgatttaccagcaccacttggcccaacaatataggcaaattcgccagcatcaatcgttacggataaatccttgattgctgtgacaccatttggatattctttggacacattcgtcattcgaatcactgaggtaacactcctttttaattgttcatcatgtaatctacaaaaaaaactagtcgtatcttattatagcatgccgtcttacttattcggcatcaaaattagtaaactctaacgaatccctctgccaagcttaattcggatttttttggctcaattgccattgtaagtacgcatacataaagggatctaaatcaccgtccatgacggcttgaccgttacctgtttcgtaattagtccggtgatctttaaccatcgtataggggtggaaaacatacgatctaatttgtgaaccccagccaatttcgagttgttcacccttgatagcggctgcttttttagcttgttcttcttgttctttttgatataacttggctttcaacatgttcatcgcagtttctctattttgcaactgtgatcgttgtgcttgtgaactaacgacaacccccgttggtaaatgggttaagcggacggctgaagaggttttattgatatgttggccaccagccccactggaacggaaaacgtcaacccgcaagtcctctgtgcgaacttcgatatcaattgacccgtctaattcaggcatcacatcgacagaacaaaatgatgtatggcgccgaccggctgaatcaaatggtgaaatacgaactaagcgatggacccctttttcagagcgcaataatccgtaggcattatggcccttgatcatcaaagtgacactcttaatcccggcttcttcaccggcttgatagtcctctgtttctacggtaaaaccgtgcgcatctgcccaacgtagatacattcgtaataacatcgcaccccagtcttgagattctgttccgccagcaccaggatgtaattcaacgattgcgttattgctgtcgtattcacctgataataattgccccaattcatattggcgcatctgactttgaatctgctctaagtcggcttcaaagctcgcctgtagctcatcatcaggttcttcttgtaataactctaaagtgacactcaattcttcaaactgcgcctgtaattggttaaaagaatcatatttttcttttaacacattattttgatcaattaattgttgcgctgattgttggtcattccaaaaatcaggatcgcccatctgtgcttcattttgtgcgatgctttcttgcaggccttctaagtcaaagagaccccctgaactgcgttattttactctcaatttcgtttaataaatgtcttgcttcacttaattccatttgattaacctctttttgatttcatgccattaaaaaatggctaagtcaattgcctcagccattcgttaattagcgtcgaatattttgacgaatttccgccttcatgaagagtcgagttgtatcgtaatcgatatcactaatcatttcttcaaacattctgtagccttcttcttgatattcaaccaatggattcatttgaccgtagccccgtaatccgattgaatttctaagttgatccattgcgtcgatgtggtctgtccaacgttcatcaacaacacggagaataacaactttttcaaattcaagcatttgattttcatcagataattgtttttgttttgtcgcgtaattcttttctgcaaaagtcatcaataatgcttcgatttcttcagctgacttgccttgtaacttctcaagtgttaattgttcttcactaaccattgaagtcgttgcaaaatcatgaattgcttcaaggttccaatctgctgtatcaccttgtgtgtgcaattgaacgattcgtttaaccgtccgtgaaatcattggcataatcacttcttttaagttgtcttctgccatgatgacttgcatccgttgtttataaatgacttcacgttgttcacgcatgacatcatcgtattgaagggtttgtttacgtgtatcatagttattcccttcaacccgtttttgtgcggcttcaacttggcgagtaatcatcttactttggatgacagcatcgtcgtctgaaatcttcatccgatctaggaatgctttgattcgttctgaaccaaaacgtttcatcaagtcgtcttccaatgacatatagaattgtgtttcaccaggatcaccttgacgaccagcacggcctcgaagttggttatcaatccgtcgtgattcatgacgttcagtaccgataacggctaaaccacctaaatctgtgacaccaggtcctaatttaatatcagtcccacgaccagccatattagtagcgattgtaacagcgccccgttgaccagcattcatgatgatttcagcttctttgaaatggtttttcgcattcaagacagcatgcggcacattattttcgtctaataaacgtgatagtaattctgatgattcaaccgcaaccgtcccaactaatgttggttggcctttttcgtaacgtgatttgatgtctttcacaacggcgtggaatttactttcaagcgttgggtataacacatctgatttatcgttacgtgcgattgggcggttagttggaattgagataacttccatattgtaaatttcacggaattcttcttcttcggttttagccgtcccagtcatccctgaaagtttgttatacattctgaaataattttggtacgtaatgttagccattgttttggtttcatcttggatttcaacgccttctttggcttcaatcgcttgatgtaagccatctgaataacgacgaccatccatcacacgtccggtgaattgatcaacgatcaagacttcaccatcttgaaccacataatcgatatccttcaacatgatgaaattagcacgcaatgattcatccaaatgatgcgtcaaagctgtattttcaatgtcatataagttatctagaccaaaattagcttcagctttgccgataccggcttctgttaaactaattgtttttgtaggccaatcgattttataatctgcatcttcttttaacgtcttcacaaaacgatctgcacgaatataaagtgccgttgatttttctgcttgtccagaaataatcaatggtgtccgagcttcatcaattaagattgaatccacttcatcgacaatcgcaaagttcaatgggcgttgtaccatttcttctttgtaaacaaccatgttatcacgtaagtaatcaaagccaagttcactattagttgaatacgtaatatcagagttgtaagcatcgcgtttttcttcaggagtcttcgcatttaagttcaaaccaactgaaagccctaaccagttatacaattcacccatttcagtcgcatcacgacttgaaaggtattcattgacggtaacaacatgaaccccttgacccgcaagcgcgttcaaataaacgggcattgtggcggttaacgttttaccttcaccagttttcatttcagcgatattaccttcgtgtaatgtaatcccaccaataatttgaacccggaatgggaataaaccaagcacacgtttagcgccttctcgagcgaccgcgaatgcttcaggtaaaatatcgtctaatgtttcgccatttgctaatcttgttttaaattcaggtgtcttagcttgtaacgcttcgtcagataaattactgtattcatcttcataagattgtactttatcggcaattttgcccattcgtccaacttcacgtttatcgctttctacccatgattttagaaaatttgccatgtattataattctcctctggaaattctgatcactatgattttaattaaattttagaattactggaccactaacatcttattctaacatttattacagtcaattaaaacctgatgcttaaacaaatacatgcgattaggcataaaattaaccctattacctatagtcttattctgaaaataaataaagggctcgaaacaaacactattttgtttgtctcgagcccttcacgatgtttatttaaaattttttattcatctgtttcgatcaaaccataacgaccatcttggcgtttgtaaacaatgcttgtgccatttgtttctgaatcttcaaagataaagaattcatgacctaacatgttcatttgtaagatggcttcttcgctatccattggttttaatgaaacacgtttagttctaacaacttgcattggttcttctggtaaagtttcttcagaagaaaccactaattcaacacccttgataccacgttcacgtgatttacgattaatttttgttttatatttacgaatttgacgttctagtttatcagttaccagatcaacactaccgtacatgtctggtgatgtttcttcggctctaagaaccaagtaagggagcggaatagtcacttcgaccttcgctgttttatcaggatagactttcaagttaacgtgtgcagttgctgtagctgattcatcaaaatatttttcgagtttgctgattttcttctcaacataactccgaattgcttctgtgacttcaatattttctccacggacattaaaacttagcatatgatttctcccctttcacaaataaccccattggttatttgtcacccaataattgatagattattggggctttgttactaagttcattatatataaattgcggccaatagacaaataaaacgattactatctggctaaagtaatcgcattaattgtagcttggggataattagcacgcagacattgttgtgcatgccacaccgttcggcccgtcgtataaatatcatccaagattattatcgattgcaccttagcaggcaattcttgcggtattaattcaaaaaattgtggacttgcaagacgttctgcacgatttttttgtgcttggcccttctctgttggccgctttttcaatagcgatgttaacggaaaacaagtttcgaataagccttggactggattaaagccccgttcttgttgatgttgctcatcagatggaataggcacgtaagttacattgggttttactggaaaccgagttcgaatgtcgcgttcgaataacagccgtaattgatagtctccttggcccttataacgttgaaaatataactgcatcgctcggttataagtaaacagtgcctgagttttaagatgctgctgaggataacgttgtcgccactgctgacaatcagggcacaaaatacccgttagcagcggtcgactacagtccgaacaccgatgaccactaatgcgttcaaactgctgtaaacagacttggcagatatgcggattaagtagtggttttaattgcaaaagttgcttgatacttggcttttcgataattaaattgtggcacattaaacagtcgattgtaatcgccgtcccctctgattttgggccttaatttgccgacaagcgcctttgatcgcccgcgtatagtcttgataataaaaatgaaccggattttgggcgtaatctttatgccgtcccgctcgcccggcaatctggaccaaaacggcttcgttaaacaccatgtgttccgcgcctaagatcaaaactgcaacgtttttaaacgtaacgccccgttctaaaatggtggtcgtcaccattagctgaatttgttgtgctctaaacgccgtaatctttttgatctgatccggatcgttagcatgcaatgtttcaatcctgaccgccggcaataaggttgataaccgattggcaactggttgcaataaccgcacttgcggcacgaataacaaaatctgttgcgtttttaagcaagtctggcaatcccgttcaagccgtttaggtaaccggcctttttttaattgggcccgccaattaaaagcgacgtgccgctgtggttctggtaatagatgaccatggaatcgaagcggtaattcgctaaccgtcatttgtttagcagcaattgcccgtttgatagcaggggtcggggtcgccgttaaatataataaagtacattggggcttgcaggcttgttcaactgccgtggctaaaacgggattatcaacaaaaggaaaagcatcgacttcatcaacgattaccgtgtcaaaagcgtgataaaactttagcaactgatgcgtcgtgcaaatcactaactgcgtatagcgatagggctcagtttgctcaccgtgcatcaacatgatactagtcgttgcaaaggcggcttgcaggcgcggataaagttccaagcaaacggcgactctaggcgctgccagacatacccgctgacccttttgaagcgcaactaaaattccttgaaaaagcatctcagtcttccctgcaccggtcacggccgttaatacgtgccgtttttgtgtttgaaccacctcaaccaccgcttgggcagcttgttcctgatgcggtgttaattgcccctcccacgtcaattttggtatgttattttcgaataaatgacactccggtaccgtgtataaccaatcgccctctaccaaacgaccaaataacaaacattgcgcgcaataatggcgaccgtctggtaagcaggtttgcgggggcaccacttgctgacaacgttggcagactaagcggtgcttgacccgtaaaaacgcaggtcgccgcttaatctgtggtaaactatagttattattttgcgtatcggctaactgggccgccgtaaactggcgaccacaggcaattacttgttgtcccatttgatttgctcctttagaactaacatacgcaatcagaatttatttttttgaggtgacctccatggaaagttatttaaccgttcaagcagacgggcagtttgaacttgaaattaaaaagtcccgttttatttgtcaaatcgctcgggttagcgatgaagccgctgcccaagacttcatcgaccaagttcgtaaaacacatacgaaggctaatcataattgcttcgcctatcaactgggacaacccgctaatattcaaaagcaaagcgatgatggtgaacccagcggtactgcaggtgtgccaattcttgaagtcttgcgtcaaatgcaacttacaaacctctgtgttgtcgttacacggtattttggtggaactaagctaggcactggcggtttaattcgtgcttatagccacgcgacttccgctgctctcgagcatctcggtatcgttcaaggaatcgaacaaacggcttgtcagttaaccatcgactacgctcagttcgactcccttcaaaatcgcttagcgcaactagcgctaaccgctcaggatattcaatacacaaccaatatccaactaacggtctggctccccaccgaagaagtccctgcctttgaggcccaaatgacggaattgctcaatggtcagctcaccttagggcttggacaacaacaatttaacgaagtccccatcagcgcgcaagcgattcacgacttgcgttatcaaaaataaccatcaaaaaaaggattagccagtggctaatccttttcttcgtctttaggttttaataatcgttttagtaaatgtaatagcggttggcgattctcgccaactaacccaattgattcaacaaacaattctaggccaatcaagaccgcgattgttaaggctaagctcccccacaatgttgataatgggtatagtaacgaaatgagtgagaaaaccaacgctaaaccgtaaataaccaataccgtttgccggtgtgataatcctaattgcatcaagcggtgatgtaaatgatgtttatccgcttgtgaaattggtttgcggtttaagatccgccgtaacattgcataaaccgtatccgtaattgggacccctaaaataataactggaatcaataatgtaatgaaggttacgtttttcaaccccttcaaggataggaccgcaatcatgaaacctataaacaaggcccccgtatcccctaagaaaatcttggcgggatggaaattatgcggcaagaagccgattaacgcagcccctaagcagaaaatcataattgaaacactcacattggtaatcgataggaagaaataggcaattacccccatcgtgaatagcgcgatgattgagacgccggtcgctaaaccgtctaagccatcaattaagttcaccgcattggtaatcgctaagatccaaaaaattgtaattggaaaacttaaccatcctaatttgaaagtcccaacaagcggaattgttaggatattcatccgcacacccgctaagaagtaaatcactaaggcagcgattaaaatccctaacattttttctttagggcttaattctttgatatcatcaatcatcccggtgatgatgataatacattctgctaaaaagatgctaaatagttcgtgcgtcggaaactgtccgcgcaatagaataaaagtgcctacattaaaggcaataaaaatcgccaaaccacccattgagggcattgctttcttattcactcggcgagcattgggtttatcaaccgcgcctaagacaaaagctaagcgtctaacgagcggtgtaattgcggccgaaacgagcatggtcgcaaacaacccaacgatgattctaaacatgggcatcatttgattcgcctactttctctaacattcactttattatacaaatcccagcccataaacacaactaggacttgatttcttaatgaaattcaaaaaaagagggtgcgacaaatttaattgcccacccccaagaatatactcactaaaaattacttagcatattcaactgttcttgtttctcggataactgtgaccttaatgtgaccaggatattcgagttgatcttcaatctggtttttaacatcacgtgctaagacagttgcttgatcatctgtgacttgttctggtttaacaatcacgcggacttctcggccggcttggattgcaaaactatgatcaacacctttgaaactattcgtaatactttcaagtttctcaagacgatgaatatagttttcaagtgattcagaacgcgcccccggacgagcagctgaaattgcatcagatgcagctactaagactgaaatgattgatgttgcttcaatatcgccatgatgtgagccaattgcgttaatgaccgttgccggttccttataacgcgttgcaagttcaacaccaatttcaacgtgtgagccatcaacttcatgatccagtgctttaccgatatcatgtaataagccagcacgtttggcgagtgtgacatcttcgcctaattcagcagctaaaatccccgttaatttagcaacctcaattgagtgattcaagacgttttgaccataacttgttctgaagtgtaaacgacctagaatcttaatgaggtctggatgcatggtatgaatcccgacatcaaaaatggcttgttcaccgatttggcgaatttgttcatccatttccttacgtgatttatcgaccatttcttcaatacgagccggatgaattcgaccatcttgaattaacttctctaaggtcatccgtgcgatttcacgtctaattggatcgaaaccacttagaacaactgcttctggtgtatcatcgatgattaagtcgatcccagttaacgtttcaagtgttcgaatattccgaccttcgcgaccgataattcggcccttcatatcgtcattaggaagcgtcacaacagtcactgttgtttcggcaaccatatctgctgcactacgttgaattgcttcagcaactaatgttttagctgtccgatcagcatgttccttagcagattcttcgctttccttaattaaaacagcacgttcgtgatccaagttccgttttgtttcgtccaaaatgatcttttgcgcatcatcatgagaaagttcagcaatctcttgtaacttcgtccgttgttgttcaactaacgtttcgacttctgcttgcttttcctttaattgttgcgcttgctcagccaaacgactttcgtgttcttccagtgtccgttcttttttatcgagcgtcgcatctttccgatccatcgtttcttcacgctgtattaagcgattctcttgtttttgaacttcaccacgtcgatccttcaattcattttcaatttcagagcgatattgatgattttcatcctttgcttccaaaagaatttcttttttacgcgttgccgcttctttttcagctaattcgattattcccctagcagtcttatttgcaccatcaatttcacgttcgtgggccttcttttgcaaaattgcaccaacggcaaaaccgacgattaacatgatgactgcggtaaggattaatagcaaatctaagttcattttttcacctccgcatcatcaaaaattttaaattgcaatcacattgcaaatttttaaagatgttattatgtttaatttttcaacacatagttattttatagtttagtaaaccgcctgtcaacttaaagtatcagcattgcaaccgtttaccggagtgattgctatccgtttattcggttaatccgtctcttcttgcattaagttcttagatataattaatcaccctactgttgaatcgcgaatatgggttggcttctcagcaatcccattcggtagtagaccctataagtcttaatttatcaggcattggtcttgattattcggatatacctaaaacaggagccagtacaaaactaagttttggcctggctcctgttggtcatactttattcttctgttgaatcatctggtaaaatatttatttgttcatcttcagttgttgggagatcttcttcaggtacatctgaaataccataagctgctctgaccttcaaacgaacttcatcttcgacatcttcatgatcagccaaatagttcttagcattttctcgcccttggccaattcgttctgagccataagagtaccaagaaccactcttattgataatgtctttttcgaccgccatatcaaccaattcaccggttctggaaatcccttgaccgtacatgatatcaacttcagcgaccttaaatggtggcgcaaccttattcttaacgactttgattcgggcccggttcccaatcatatctgtcccatttttgatggtttcagcacgacgcacttcaagccgaacagttgagtagaacttcaaagcacgaccacctggtgtgacttcggggttaccaaacatcacgccgactttttcacgaatttggttaatgaataacgcaatcgtcttcgtcttattaatcgtccctgataatttacgtaaggcttgtgacatcaaacgggcttgtaagccaacgtgagcgtcacccatttcaccttcgatttcagcacgtggtaccaaagcggcaactgaatcgacaactaaaatatcaacggccccacttgataccaaggcatcagcaatttctaagccttgttcaccagtatcaggttgtgacaagagtaagtcatcaatattaacgccaagtgctgttgcatacttaggatccatcgcattttcagcatcgatataagcagccgttccaccttgcttttgcacttctgcaacagcatgtaacgcaacggttgttttacctgaactttcaggaccgtaaatttcaacgatccggccgcgaggataaccacctactccgagcgcttcgtccaatgccaatgaaccagatgaaactgttgagacttgtgtatcaaccttttcacccattcgcataattgaacctttaccaaaattcttttcaatcttctttagggcagcatcaagtgctgcttgtctttcatctttagccaattaagtgaccctccttaaaagagtacatttcattactctcttagtttacagatttcgttaaacaaaagcaagttaaaatcgaacaaacgttcttaatatttattcggtcattctataatacgtaattcgcggggattttgccaataaaaaaactggtccgctttagcgaccagttttgttgattatttagaaaatgaatccttgaagataccacgatttttgatgaagtattctgtacctgaataaatcgtgaagaataggcaaacatataacatgatatcagccattggtaagccgatatttgcaaagaacacgttatgcaagaataataaaataatcgccaacatttgagttgtcgtcttaatcttaccaggcatggcagcagccatgacttcgccaccttggctcaagagtaatctgaggccagttactgctaattcacgccaaataataatcgcaaccacccaagcaggtgctgcaccgagttcaacaaggaagatgaaggctgtcattaccaataacttatccgctagtggatcagcgaatttgccaaagttagtcaccaaatgttgtgaacgtgcaatttttccatctaacaaatccgtcaatgatgcgacaataaagatcaccgttgcaatcaattcactgactggaatagccgttccagcaacgagtacttcacctgccggtacgttaaacgctaataggattgtaaaaataggaattaaaataattctaaacatcgtcaatttatttggtaaattcatcggatagacctctcacatctctttattattttgcaagtgttgctgtaaagttcactgttcgaacctgaactgtttcattattaggatttaaattaacagctgtgtcgttaatcttcatcttcgttgcaggcccgttcccagttttaactgagaattgtgttaccccagctggtaattgcgttgtttgatcagttcctggtgtaacagaaccctgccagattgttgacccattgacaattaagcccacccaagctgttgtgttttcagctgagaacgtcaacgtattggctttgttaggtaagtttttaattgtaaaggcttgttgtgaaccactcatacttgtcattgaagctgataattttgtttcttttgcttttttgtcagcttcttttttagattgttcgcttgctttagaagcttctttggccttgctttcttgtgctttttgttgattatcgtctgagcttgcttttttagttgttgcttgatcacctgaaaccgtcactgatgaactggtttcagttaatgtttcccgattcttgccacgattacttaacgtaataccatagacaatcccaacaatcacaatcacaatagcaacaacggcgatttgtggtgctaatccccgccattttgaccatttagagtcggttgtttcgcgtgttaatcgcgtttgattttcaactgatttttcaacgtattcttctggttttgcgttaggcaacttatcttgatattcagctaataaggcttcactatcaacacccaccgtttgtgcgtattgcttaataaatgcacgcacataaaaagtaccggggagcgcatcgaaatcgccctcttcgattgaacttaaatagcgtttttgaattttcgtaatttgttgtaaatcatctaatgtataacctttttcaatacgtgcttcacgtaatttttgaccaatttcgttcatttgaattccacccactattatcccattatcattactcgtcattatagcatattgccacaatgatattgtattaagatttctttattttagccaaccaccgtcaacataaattgtctgtcctgttaaataattggcttctggtgctaacaaagtctggacccaataagcaatctgtgttggcgtcgcaaaacgcccagttggaatctcagcggcaatcgccgcttgttcatctgctgtaaactgttgattcattttcgtggctactgcgccaggggcaatcacgttaaccgtaatgcctaatgaaccaacctcttgtgcgtaagcattggcaaacgccgattgcgcgcctttgaccgtgctgtacggtacttccatcgcactaccacgaccgccataaatggagccaataaaaacaatccgtcctaaatcactctgcgctaatttcgactgcaaagcctgtaaaatcaacatcggtgtcttcacgtgcacttgccacaacgcatcaatttgctctgcagagacctctggcaataagccgtaagtcgtcatccctgcggcaaaaataaccgcatccacttgaaataattgcttttttaactggtcgaccgcagtggtaccagtcgttaaatccaactgaagcgcaaaaaaatcttggcgcgcatactgttgactaagttgctgttgtagtttgtaaatacgttcttgattttggttgtaatgcagataaagcgaccagccgtctgctgctaagcgttcggcgatggtggtgccaatatcaccggaggcaccaataattaaagctgagcgactcattattgcgccacctctggtaagatatggcaaaccgtcataatttcaattttaaagaactcggcagcaacttgtgccaaatccgctaatgtcacttgttcaattaaacctaacacatcaaacggacttacttcatcgaaaaaggcgtcgctatattgattggcgattgcttctaatgaattaaaggcctgtagatattcgccgattgcggctcttttaaccaacgctaaattggcttctgaaaaatcaggactttcctgataatgttccaaaatattgatcaacgcatctgataaaccttgtgcatcgtctgtatcgccaccaagcgtgatgaagttgaatgagcgttgaatggcatattcatagccaaagctgtcatccaaaatcccttgttcatataatttttgaacttgtgttgatgaatccccaaagagtaattctaataacaggttcatcttaattttcatttctaatgcttcttgaccagttccaaaatcggttaaccctttgatgccgaccatgctcttactgcgtgtcactggcatttctaatgagcggtacggaataatgtcactgccgtcagcttcttcttctggtaatgagcggttaatgtcgcttggtgctacaaaatctttagcgtcttgattagcgttgacccacgacaagacctcttcagggtcatcgatctgaccaacaatgaataaattcatattacttggttggtagaacgtttgatgcgcttggtacaattcttcaggcgtaatttgcgcaatactttcgatggtgccagcaatatccgttcgcactgggtgttgtggataaaggttgccaattaccgtataaaataagcgccaatctggttcatcattgtacatctgaatctcttgaccgatgatgcctttttccttatcaaccgttgcagttgtaaaatagggttcttgcacaaaatcaagcaagatatccaagttttccttcaaatgactggttgttgaaaagaggtaacttgttcgcgtgaagctcgtgaaagcatttgaactagcaccaaattgcccaaatttttcaaaggcatcataatccgccttttcaaataacttatgttctaagaaatgtgcaatcccgtcaggaaccgtcacatagtccgtttgacctgcaggtacaaaagtcgtatcaattgcaccatagtctgtcgttaaaatggcataggtcttatgataaccactcttaggatagagtttgaccgttaacccattttccagagtttcttcatagagggtttcacctaagcggggattttgtctaagcttcatttgtgtcgacccctttcaagaagtagattgcttgcagttgcatcttagcggcttgttcttgaaccgcttgtttagaaacggccaaaatagcggtcgtgaatcgacccgcgtctaattccgtttcggggacaaaaatttgattgaactgttgttggcccaaataacctgggctatcaagacttgatttaaattgattaattaaggctaatttggtttgttcaaacatcgcttgtgtaaaatcaccagcgataatactttgacgttgcgcttcaataatggctagtacgcgttctttttgatggctttcaattccggtttgaaccatgacagccccccggaaagcatcgatattgctagaagcgtaataggccaaactcgccttttcacggacattcgtgaagagtaacgatagtggtgtcccaccaaataacgcgttcataactaaggccgcgtaataatccttttgatagaagtaagctggcaattgataagccatgtttagcttaccttgttgaaccgcttgttcttccgtcaattcacggaccgcattgctagcagcttgttgataaaaaatcccaggtagcatttcgccccgtggtgctagtgataattgcgccaaatcaagcgccaatttttcttcatccacattacccacaaccgtcatttgaattcggtcatttgcaatcatctgttgataataagtgtataaatcagtggctgtaatcgtctttaaaacgtcagcatccccgtaattaggcgtttgttgcgtttgatctgtaaagtagagttcgcgtagtttgagtgcagcataagtttgtttgtcatcggcaacgctgtcgatatagcgttgcaagttttctttttcccgatcaaaagtaaccgcgttaaaggcttgatcaatgacatctggttttaaaagtagttcgccaataaaggcaattgcttgttgttgtaagtcgattgtatcgcgtaaatattgagggctgacaatccgcattgaaatactaaaaattgctaattgtccttgccggtatgcattcatattgaagccagccccatacattgcttggagttgattggcaattgcaacctgatcacgataagcttgactactagcagataaaacactggctagtaatgaccgctttgttagagtttctttagtcgctggtgccactaattgtacagaaaagcgaattgttttgaattgttgtgtttgtaagatatttaaataaacgccatccattactttttgattcatacttgctgctcctcactgttttaacagttaaaatggcttgctttcaacttaagtctttttaagaataatgtaacagacactatcataccaaaaaagtgggttaaactcaaaagcgccaccgttttaacaactctggtttttctttgaaaaaacggtattagaatcctgctactgattctaataccgttttttgttcattattcagttggtggttgttcgcttggaacctcttgcaaaaggaccttgcggggtttactaccttcagaaggcccgataatcccgcgactttccatttcatcgatcagccgggctgcccgattataaccgactctaaaacgacgttgaaccatcgaaacactcgcggtttgttgcttaaccactaattcaaccgcttcttgataatattcatcttctggatctgccgtttcttggtgttcatcagccgccgttggaatcatctcttcatcgtattcagccgtcttttgagctttgataaaggaaacgatgctttcaacatcttgactggagataaaggcgccttgaactcggagtggtttactcatcccgattggtaggtacaacatgtccccacgacccaggagcttttcagccccactaccatctaagatggtccgtgagtcaatcccactagaaaccgcaaacgcgatccgtgatggaatattggccttgattaaaccagtaataacatcgacagatggccgttgtgtggcaacaatcatgtgaatcccggctgcccgggccatttgtgctaaccggataatggcactttcaacttcgttactagcaaccatcatcaaatcagataattcatcaacgatcacgacaatgtatggtaacgccgcgcccttgatttcgccatcttcattatggccttgaatatattggttatattcggtcatattccgctgaccagtatccgcaaaaagttgatagcgtcgttccatttctttaacgactttattcaacgcgttggccgctttcttagcgttggtcaccaccggaatcaagagatgcggaattccgttatagacatttaattcaaccattttcggatcaatcaacatcaacttaacttcatggggttgggcgctcatcaaaatactggtgatgatcccgttaatcgctactgacttcccactacccgttgaaccggcaatcaaaagatgcggcatcttcgccaaatccgacataatcactttaccggaaatatctttacccaatggcactgccaacggtttgcctggatgtggtggctcttgttcgatcatctctctgaaggaaactgttgagacagttgtattagggacttcaatcccgacgtatggtttgcctggaatcggtgcttcaatccgaatgtctttggcggccagtgctaacgctaaatcatcggccaaattaacaatcttcgacaccttaacaccaacagccggttggatttcatacttcgtaacggctggtcctaaacttgcactcttaaccgtgacatccacgccaaacgaatcaaaggtttgtttcaagacctgttgatttttttcaatcgcttcgtattccgcactctgatctgatggtggaatctgcgtcaacaattcaggcgttggcatttcataatccgcatcaatttctacggcatgcgttaattcggcaacatccggcacttgttctgtcggtgtttccgcagttgcttctgccttgttagttgcttggtgtgttgcaattggttttggtaaatccttaggcccattaatcttaaaggtggctggttcattcaccacaacccccgttttctcaggctcgccggtcggttctgaggtaggctttttaaccgtcttggttggcgtcgttttttcgtcaaccgcagacaacgcattttgcgtttgttctttgagcgcgctgacttgatcgcggcccttttcagtggccttcaccaagcctgatttagtatagcgtccgacttgaaataagccgtgaacaaagcgttggctgcttttaacaactacgctaaagggaatatccataaaaataaacagccccatgactgtcactaacacggcaatgatataggtccccatctgtgcaaacaaaaaatgcgaaccgctataaatcacggcaccaactaggccaccgccgacctccgtcgtaactgccattttttggaaatcttcaaacaataagcgccaagtagctgcgacaaaatggttattaatcgcttgttggtgcaagatgaaagctgatagccaaattaaaataccaatgtaggctaaactaaaacccaccgttttttgttgccacaatggtggttgtttgccataaattaagaggtaaataccgagcattgcaaatagaattgcgcccaggacgaatgtgtcaccaacgaataagcggaaaacattcgcaaatagtgcgccgataaatcctaatttcagcccggagaaaagactaattaaaataaacaaaaagccgacaaaattaatcgtgtaatcaggctgttgcatttttttcttcttagtcgtcgtttttttcttacgctttttcgtttgagttgccataaaatctccttaccttacatatctaatccttattatacacgaacttctgttcaggttaacccatcttttaggctttattcaaacaaaaaaagaagcccaggtcaaccgaagttccccttagcttctcttatttaatcattatgcttcttctggtgtttcatgcgctgtaaattgaagttgaatcccttcgttcaaagcaaccgctgttacttgatacgtcaaggtttcaatgtattcgattaatggtcgtgataatttcatcatttccttttgtccgatttcatctggtgtgccaaagaaatctaacaattgaacaacccgtgaaatttgaccagatacggcaaagccgcttccttgtggcatcacttggaatggtgtaacgatttgatagatgttaccggcttttaaatcagcttcttgtaaatattcgtcgtcagcatcaattttcactaagctcacttggatattttgttgtggttcggcgtccggtgacacacggtcaaaatgaaaagcatcaacgctaatgggatcttttttagtttgcattagaaacactcctattttaatttatcgtgatcgtacagatgactcttttctaaccctggaaaatcttgttgccgtaatgcttcaaaaatgaccaatgctgcacagttggataaattcaaagcccgaatgtgatctgacattggaatgcggagacactgatcttcattttcacgcataaacgtttctgggaggccagttgtttccttaccaaacataaagtaatgatcaacacttgtatccgtcacatcctgatcagaataagcttgcttggcaaacttcgtgatcaaatagaggtgtttacgatccggaaccgtttctaaaaaggcatccaagttcttgtggtaattaatcttcacttggtcccaataatctagaccagcccgttttaaatgtttgtcgtcagtttcaaagcctaatggttcgattaaatctaaaacagtatccgtcccggcacatgtccgggcgatgttgccagtattagctggaataagtggttcgtataaaacaatatgattagtcacaatctaacttccttcaataaagattcagtagcttaattatacacgatttaatggtaaagctctactggtgctttccatataaaaaaacgtagtccctcggttattcacggcgagaaactacgttagtgtcatttcatcactagcttttatcaaaaagtattctgataaaagttagggaaaaaattccttgtggttattataacgcccttatttctgacttgcaatcagatttcttaaaattactttaatttctcattgttttcccaccaaaaccgtgacatccaatgatatctctggtaatgccgccaacgtaatcgcttgtaattgcgcctctgttgctgtccaagttaaaggtgtcatctcgactaaatccgctagtgtttcgggtgttaaggtcatcttttgttgaacctgaatttcttggtagccgggaaaatgttgttcgaataagtccaatactggaccatgatcgtagctttccttttcctgaccctgatataataattctcgtagctcgtgcaaataaccggcattaggaatgactttaatgagttgaccgtccggtttgagcacccgtttaaattcttggtattgcgatggcgaaaagatgttcaagactgtgtccaaactctgatcagcaaacggcatccgcgctaaatcagcgacacaaaaccaaccttcttgattgtaatcactggccagttgaattgccggtttagaaatatcaaagccgatatattgggctggtacctgttgggcaagttggtaaaccggcgttccttcgccacaaccaacatcaagaatccgactattggccgtaagttgcttagcaatttcatctaagaacggtttaaagaagccggcctgtaagaatgcccggcgatggcttaacatttcttttgtatattcagacttcatttgtttgggtaagaagtacaatgtcccatttttagccaagtcaaaactatggcccgcttcacaaaccaattggtgatcactaatagtggcaaacgccccttggcaaattggacattgcaaggcgcttaaattggcttgtaggaattgttgcgctaaatcaatttttttcaattcaaattctccttatttcaatcctttacattctaaaaatatcaagtaaacttagtcatatcaagttaccgacgaaggaagtgaactcatgctagatacttatcgcttcgatgaagctaaaaagaagttaaccaagcatgctaaaatccaacccaatagttggattaacattaccgatcccacgcaagaagaaattgatttactgactaaaaaactgcacgtcccttccgatttcatctattatagtttagatgccgacgaaagtgcgcgtgccgaacacgatccagattataacgcgacattaatcatttttaacatgccgattcttgaaaaagatgatcagcaagctgataaattccgctacaaaacgagtcctctagggattattgtaacagattctgtcatcttaaccatcaataaaacgccagttgatttcttacagagctttattgataatcaaatcaaaaactttaatccacaggaacaacggcgcagcgtcctccaaattctctatcgcatttcgaccatttatctgcaatatctgcgagatatcaaccgttcccgtgaacgtattgaaaaccgtttgcaaaagtcgctacgtaatgaagagctttacgatttaatggggattcaacgcgggttagtttatttcatgatgtcgttaaaaaccgataagatggtactagcgagtttgatgcgctctaacatgttaatgctcaacgaatctgagattgacctcttagacgatattcaaattgaaaatcaacaagcgatcgaaatggccgagatttccaattcaattatcaatgaaacagctgatacgtattcatcaattattaataataacatgaataacgtcatgaagtttctagcatcttattcgatcatgctaaccatccccggcttagtctttagtttctacgggatgaacgttgccttacctttagccaattttaaaattagttggattgtcaccattgcgatttccttaaccattgcggggctcctagggtttcgcttctggcggaaacgttatttctaaattattttcaaaacaccgagcaaaccattatctggattgttcggtgttttttaattgactttccgatatcaactcgttagaatacgttatgtacgaattaatcgtcgtacataaaaataaatgttcgtatttaaggagaattattcatggacgtatttgattacgaagatgttcaacttattcccaataaatgtatcgtcaaaagtcgaagtgaaattgataccactgttcgctttggttcagagacttttaaaattcccgtggtccctgctaatatgcaaaccattattgatgaaccgctggccatttggcttgccgaaaatcactacttttatgtcatgcatcgtttccaacctgaaaaacgcccggcattcatcaagatgatgcacgaacgcaacctattcgcttcaattagtgttggcgttaaggacgatgaatttgacttcatcaatcaactcgcacaagataacctcatcccagaatacattacaatcgatatcgctcacggtcactcacaagtcgtgattgatatgattcaacatatcaaaaaagttttacctaaaagtttcgtaatcgccggcaacgtcggcacaccggaagcggttcgggacttagaacgcgccggtgctgatgcaactaaagtcggtattggccctggtaaagtctgcatcactaaaatcaaaactggttttgggactggtggttggcaacttggtgcccttcgctggtgcgccaaggcagcaaccaaaccgatcattgctgatggtggtatccgtactaacggtgatatcgctaaatcaattcggtttggggccaacatggtcatgattggttccctttttgccggtcatactgaatctcctggcgaactagtcgaagaagatggccaacaatttaaggaatattttggttcagcttctgaattccaaaaaggtacccaccaaaatgttgagggcaaacgaattttagtgccttacaaggggtcaattagtgacacccttaccgaaatgcgtcaggatctacaatcttcaatttcttatgctggtggcaagcgcttatcagcactacgaaaagtggattacgttcttgtccgtcattctatttttaatggcgatatgttgtagaccaattattaaaataatgaatcacccttttttggggtgattcttttttagttaggtacctaaaaactttccccctatctattgaatcagcccctaaacaaatgtataatgacctttgtcgctttcacagcgtcgacattgagcagaaaagggtgtgaaacaaatggatattaaacatacacttggtgataacagtgttatctttcgtgatgcaacttacattagaagaacggtgtttgttcgagaacaaaatatgccggaaacacaagaaatagatgcacatgaagatcatactattcactacgtcggttacattgagcaagacccagccgtaaccgcacgtgtccatgtactaaaagatggcggttttagaattcaacgtgtcgccacaattaagtcatttagaggtcagggccttggatttaaactaatcgaagccattatcgaagatgccaagcgcacaaaaacgccctacatcatcttatttgcacaagatcacgccattggtttctatgagaaactaggctttgaagtgattagcgaaggtgaaatggaagctaacatcccgcatcactatatgaaactaacaatcaatcattaaaaagagcatgcgtttgaaacaagttggctttgatccttagcacagaagccagtttcaaaaaggcgtggacaaaaattaatttgtccacgcctttttaattaccattaatatgctttctcgcgcacttttttattcgtataagcctgatacctttttaaaccattcaaataagtgtgtcaccaggattttaataattgcgtaaactggaatcccgacaatgacaccaaccaatccgaataacttaccggaggccaataagacaataatcgtcgtgactggatacatcgacatcttgctgccaagcaccaacggcgagactactcgtccttccagtgtttgctcaacagcaaacaccaacaagaccttgatcagtaaaatcggtgagataaaagctgcaatgacgaccgatggcaccaatgctagaaatgatcccaaatatggaatcaagttcaatagccctgccataatccctagcgttagcccgtatttcatcccaacaatccaataaccaactgtaaacatcactgctacccaaaaagcaacggtcaattgaccccgaatatattgactgacttgaccattaatttcttctaaaacctgactggtagtttcccgaattcggacggggaagaatttaacaaggtagcctttcaaccgatgaccgtcttttagcataaaaaagagaataaacggcatcgtcacaattgcgattacaatgtttgtcacgacaccgacggctgtcccgatatgggtcacagttgatgttaacatcttattcactttaccagagacgttacttaacatatccgtattgatatcatctaattgtttttgtaaggacttaaaactaggatcattaaaccaactcatcgtctgcttttgaatattcgcccaatacgatggccattgcttaattaaactcgtcgtttgtgattgaataatgggaataatcgttgccaccccccaagccaataacgccacaatcacgataaaaatcaaagtaatcgataaaacacgattaagttgccaacggtgttccaaccaatcaattagcgggttaattaaataataaagaactgccgcaataataatcggtaacccaacaatcaacatcaattgctgaatgggttctaatagccatgctaatttagttgccaacaggataatcagcaagattagaaaaacattcaataagatgaccggtaatttttgatttaaaaaccacttaaaaaaccaagattgttccttcgtttgtttatgctcagccacatgcccacctatttcctacatagtttcttgatactggattagcgtccccactttaaaatcaggtttgccttgcaaactagcatctttaggtgtcaaataaaggccactttgcagttgatcttcctctggtgctgaatcaaagatcaacgcgacatgcccaatattattgagattttcattaaccagtgccccaacataagtgacttgatatggtcggccatcaatcacaacgattgactgagttgtcatcgtaagtcgttcagattgattagccgtcgtaaaacgttgaatgagggcgactgccttaatcgctggtgttgcttgttcgttgaataaaataaccagtggttcggcggcatcaattgcttgggccccgattgccacgatctctgcttgcattatcatcactgaatctcctcgtatttaagatactctcattgtagcatattctacttaaacttaacgttttcaaacgccttttaggcgattaattaaaccgttttcgcatgaatatgctatactcaaatagtatttgatgaagggagtctattttatgactgaagaagttttaattgggggttatacccgtcgaattggtaagggcatttatcgtggtacgctctcacctgaaaccgcaacaatcactgatattaaaccttatatcactttagataacgcctcatatttggctatttccaaacaacaaattttatatactgtggttaaagaaggcgaacaaggcggcattgctgcttacgatatttctggcgccacaccggtttatttaaacgcggtcttagccgctggtgccccaccagcatacgtggctgtcgatgaggcgcgtcaattggtctacgctgctaattaccataaaggcgaaattctggtttatgccattcaaaatgatggccacctcgtattagccaacacggtccaacacactggtcatggccctcgtccagaacaagcaagcgcccacgttcattataccgatctcacaccagataatcggttagctgtctgtgatttaggcaccgatgaactaacaacctatacaatcgcagccaatggcgacttaactaagaccgcaacttaccatagtgaacctggttttggaactcggcatcttgtttttcatcccaaccaccaagtggcttatcttttaggtgaactttcaagtgaagtgacggttcttaactacgactcaagcactggtgaatttacagccgttgaaacttattcaatgttgccagatgattggcatgaggctaatggtggtgcggcgatccgtatttcacaagacggccaattcctctacgcctcaaatcgtggctataactcaattgtggtctaccgtattagtgacgacgggcaacaactcacagccattcaacaaatgtcaacagatggcgagtttcctcgtgacttcaacctctctgctaatgatcaatttctctttgccgttaatcaaaatagcgacaatggcacactttatcatcgcgatgcccaaactggtttattaaccccttgtcaaaaagatttagagaccccggaaggcgtttgtgtcctattccgataaaaaaagattggccaactgccaatctttttttattgcttttgacgacgatctgataaattaatccacattgcaactaagattaagacgattgaagcaaagtagatataatgtaagccattatacagaatatgccgtaaatctggtaataagttttgcggtaatttagcagctgtttccggattaattaattcgttaagcatgttttgattcaaccgtgaatcgccactaatccccttagccaattgacggtttaaaataatcccgtagactgacaccattaatgtttgccccaatgttcggctcagtgtattaaatgaagttgcaacccccactttatccgaaccagcaacactctgtgacgtaacagtagtcgttgtaatgatcatcccaaagccaatccctaaacaagcggcgaccattaagaaaaaccaaaacggtgttgtttgtggcacgagtgataaaacaatactgccaccgagtagaatagctaaactccccattaaaatacgttgtggtgcatgtttcactaataactggccggcccacaacgaagcgaagatccacataattgaacttggtgtcaccacaaagccccccattgaagccttcaaaccaagaataccttgcatccacattggcatgtaaacttcaaaaccaatcaagaagccactcactaaagcagccactgcattttgaacaacgaaggtccggtttttaaataatgataatgaaataatgggatcttgtgctttcttttcaacgcggacaaataaaatgaaagcaacaacggcaatcacaagcgctggtactaataagccccatgataagtgggtctcacccattaattggaagccatacaagaggcctaagagggccatcattaaccagaagctcccccaataatcaattggttgatcacttgtccgtttttcttcttgtaagaaataccaaattaaaccaatcgtaattaaaccgatgggaacattgatgaagaaaatccaatgccacgttaatttatcaacgataaacccacctaaaagtggcgcaataattgaggcaatcccccacgcagaaccgttaaaaccaaggacttttgcccgtttttcaatcggatagatatcagcaatgatggtgaaagatactggcataattgcaccagcccctaacccttgtattgcccgggaaatgattaacgtttccatatgatttgataacccacataaggatgagccaatcacgaataacactaacccaaaaataaaaattggtttccggccaatccgatcagccatcttcccatagatgggcgtcatcatcgcgtttgttaataaataaattgagaacacccaattcatcaagcgcataccgtgtaagttactaatgattgttggcatcgccgttgaaacgattgtcccttcaattgccgtcataaatgtcgcgacaaacaacgcgatcgttactaataatacatttgtctttctcttctccattacaccattctcctcttaattctaggcataaaaagagacctttcttagcttaaataagttaaggaaaggccgcctcttttactcgattgacttcttagtgatttagctttgcgatacttgcttttaaagcagcaactttatctaatcgttcccaagaaagatcaacatctgtacgcccaaagtgcccataagcagctgtctgctcataaataggtctttgtaaatctagcattttaataatcccagcaggtcgtaagtcaaagttctcacgaattgcagtttgaattgcttcttcactcactgtaccagtttcaaaagtatttactgaaacggataccggttgtgccacaccaattgcgtaggctagttgcacttcacatttacgtgctaaaccagcggcaacaatattcttagcaatataacgggctgcataactagcagaacgatcaaccttagttgcgtccttaccagagaatgcaccgccaccatgacgggcataaccaccataagtatccacaataatcttccgaccagttaaaccggaatccccttgtggcccaccaatgacgaagcgaccagttggattaatgaagtattttgtcttatcatccaaatattcagcaggaatgacagttttaataacttgttctagcatgtccttttgaatggtttctaaagtaacatcctcatcgtgttgtgtactaatgacgacggtatcaacacgttttggttgttcgttttcatcatattcaacagtgacttgtgcttttgcgtctggtcgtagataagttaactgaccactcttacgtagttcagcgaccttacgcatcaagcgatgtgataaagcgattggtaatggcattaattcaggtgtttgatcgacagcaaagccaaacattaacccctgatcccctgcaccaatcttatcgagcggatcttcatccttctcacgtgattcaagtgaatcatcgacaccttgtgcaatatctggtgattgttcatcaagtgctacaatcacggcacagttgtcgccatcaaaaccgtattggccatcacgataaccaatcttcttgattgtttctctgacaaccttttggatatcaacgtaagccgttgttgaaatttcacctacgactaatactaatccagttgtaacagttgtctcacaagcaacacgggcttgtggatcttgttctaacatcgcatctaagatggcatcactaatttgatccgcaatcttatctggatggccttcagaaacggattccgaagtaaataaatgtctttcttgcatttctatgtttccccctatatatgtgtcggttacaaggcctcttcacggtgtgtgaatcctatcgggaacttcttataactctactaccttagcataaatcacgacatatttcaaaagccattgaccttcttttcaaaaaaagttaagatgaaagtcatattatatgaaaaaggtgttgctatgttctatcttagacaaaaaaaactacctgctaataatccgcctgctcggttaatcacatttaactacttaaacctgggcttaattgtgggattagcgattcacccttttcccaagcatcttgatttatacttcatgctaaccgcgcttttaggcgcattattaaccattccgctagttctttcgacaactagtaagctaaagcgctcattagccgctagcggcctgctaattgcgttgatcattagcctaattgttggtcgtcattcactcatttgggccggtactttactagcgattaccagtttattggtacttgtgccgtttatctttccaaaacagtttaacaatcattggttgcgattagtttgtcagtttttattagcgccttcctttttcctggcaactttgattttcaatggcattcatttcttacctgaagccttgctcgtcaagattggtctcttcttagggttaattttcctttttgaactgattccaactaataagatgctcaccgttgttggtgactgcctctggttaatcaccgttcttttgattattgcgactaaaatcatcgtaggctggcaattattgccttttattattgctcaactattgttgctagcaacgcaactgggtttcattaaaaataatacttatttacatgagctttattatctcatttttattactggtttatttctataagtccttaaaaacagcctagactggctgtttttttatagcctgatttatctttttaaacgcacaaaaaaagcatcggtcgtttataacgactgatgcttttaaccgtctttttgacggtcacaacgggactcgaacccgtgatctcctgcgtgacaggcaggcgtcctaaccagctagaccatgcgaccttaaaataaaaatggaggttacagggctcgaacctgtgaccctctgcttgtaaggcagacgctctcccaactgagctaaacctccaaaaatgacccgtacgggatttgaacccatgataccgccgtgaaagggcggtgtcttaaccacttgaccaacgggccatactatcattatataacggagagtgagggattcgaaccctcgaaacaggtcatacccatttacatgatttccaatcatgctccttcggccgctcggacaactctccaaaatgatcctcagcttttttagtgccattaaatatcttggccaatactacttttcttcttattgagtgcatgtttattgtcgagatctgttctaaccactaaaacgtcgcaaacagctgtccgagtaacgtattccgttactgaaccgattaataatcgttcaaccgcatttagacctgtcgcaccaatcatgatgagatcgatgtcttttttctcagggacttcgcgagcgataaggctcttaggtgccccgtattcgatactataatcgacgtcggttaagccgagatcattggcagtaacgatatattcgtccattgttttcttagctgtttcagttacttgttcgaccattgctgaatcgaaacttgaaatgttttggaaagcgcgtgtatcgataacgtgaatcaaatgtaattgaccgttgtttctaagggctacttcaactgcttttctaaaagcaagttcagcttcataagaaccatcaattgcgaccaaaatatgtttatattgttgtaacatagtcatcacctcatttagatttacaagcttattgtacgctaattcaagaacaaaagtaaaacttaaagactaccagcaaaagataatgcaacaaatccagtgactaaactagcggcaattacggtgattagattccatgtgaggggcagtgttataaaaataacgaggcccaacacagcaattaataagagtaaccaaccggcaactagcacgcgacgacctaagcgacgattctcagcgaggttgaaaagtaaaaatgatttattttggtagtaacaaagtacaccgcctaatagggcgatgactaccaaaaataaaataaggacaaaagaaatcaaaagaaaacctcctaaaaattgtcaacaaaaaagggccaacgcaaatgttagccctgtcaaagtcattggactttgggaaatctagtggtaccgtagaagcttcccgatagttgagcccgctttaatatgcaggtgggtcagactattgttagacttggttccttcatgaaaaagtatacacttgctaacaactcgtccatcccattaacgaattacttgatcggtcaacataaggtgggaagacgcgcataccttagaaatcctactattatagtagcacgcttatgggattggtgcaacttttttgtaaccgttcacttgtggcggcttgcttgtctcagccgttcaagttgttgtttcaaaacttgctcgtatttaccagttgctttggcttcgtagtaatgactccctaaaagttttgtcgggaggtaatcttgtgcgacccaatcattgggatagttgtgtggatacttgtagtctacaccatgaccaagcttagcagcaccggcgtaatgggcgtcttttaaatgcgcgggcacttcaccggccttaccggcgcgaatgtcgcctaacgcattatcgattgctgtgatagcggagtttgattttggtgagagacagagatcaatcacggcaactgccaatggaatccgtgcttcggggaaacctaattgcttagcggctgttactgcttcaacggttcgagcgcaggcttgcggattagctaaaccaacgtcttcataagccatcgtcatcaaacggcgactaatggaaggcagatcaccggcttcaattaagcggcccatataatgtaaagcggcgtcaacgtcgctaccgcgaacagatttttgaaaagccgagatgacgtcatagtgcgcatcgccatctttatcatgggtaatggcctttctttgaacgcattcctcaatgacagcaatatcaatgtcgattaaaccagtttctgggtttttaggtgtcgagcggacggctaattctagcgcgtttaaggcgcttcgaagatcaccattggtgacttgtgcgaggtatttttcagccgtttcatcgaggttaacgggttcatcacccaagcctttttgagggtcggttagggcccgctggatggcgacgtgaatatcggcttcattaagtgggtgaacttcaaatatctgggtccgactccgaatagcggggttaatcgtgatgtagggattttcggtggtagcaccaattagaacaatccgaccgctttcgagatggggcagtaagaaatcctgttttgttttatcgagccgatgaatttcatcgagtaataaaataacagtaccgctcattttagcttcttcagcgacgatttgaagagcctttttactatctgttgcggcattcagcatccgaaaggcgtattgcgtactaccagcaatggcgctggcaatactggtttttccggtgccaggtgggccataaagaatcattgacgagagtaatttggcatcaaccattcgtcgaatgattttttgcggacccactaagtgtgtttgacccacaatttcatcgatatttgtggggcgcatacgatatgcgagtggttgttgcatagctgtcatcctttaaaataatgtttaccattagtataacacgtgtcaaaaatttaacgacgaacaagcgttttaaaaaacggtggggatgtgtataatggggatacaactttgaataaaagaggcctcgatatgtccaatcaactatttgaacaaattcaacaattacatttagccccacttttaaattggggggccttcgggattgaaaaagaagggcaccgggtgacagccgttggacaattaagtccgctaagtcatccagcgagtttgggttctcgtgattttcatccgtacattaaaactgattttgccgaaatgcagacggaattggttagcgataccttcgataataccgacgaaatcatgcaacagctaggtgccttatcagaagtacttgagatgaatctagccgacgatgaattgatttggcccctcagtatgccacctgtattaccaagcgatgaaacgacgattccaattgcagacgtcgcaccagatgcgcgtgcttaccgtgattacttagccaagcggtatggtcgtcggctacagatgatttctggcgttcactttaattttagcctggccccagccttaatcgcgcgcttatacgatgaggtctatcatgatcaatttgcaacggtgaaagattttagcgatatgttgtacttacaaatcgcacagaattatagccaataccggtatttattaacttatttatttggtgctagtccgattactgaagcactttttcaaacagatacgacgaacttgccagattatgcagtccgcagtttacgttcaagtcaactctttggttatgccaatcatgacttggtagtctcgtttgaatcggttgctgcgtatcacgattcattggaacaggcaattagtaagaaacaattgatttcagaacgtgaatattacggcagtgttcggttacgtagtcacggccatctcgcccaagacggtgttgattatcttgaattccgcggttttgatttgaatccattcgctgcaagtggtgtgacacaagaacaacttgatttcttacatctgttctttatgtacttattatcgttacctaaggctgctgaaagtttaactgctcgcatggcagaagggcaacaactaaatgaggcgattgcgcttgaagatgcgacgaaagcatcggcacaacaagctaatatgcaaatgttgatgactaatatccgtcaatttatcacgacttatcaattggatcaacgatttattgatgcgtggacagttatgaatgaacgagttaatgatttcaaacagacattgagttatcgactagcccaagaagtccaagacgattctctaaccgcttttgccatgcagcaagcacggcaatttaaacgcgaattaaccgagaaaccattccaattacaaggctatacggatatggaattatcaacgcaaatgttaatgctagatgcctttcaaaaagggctccacgttgccgtattagatcgtagtgatcaatttgtcgaattgacctaccaacaacatcatgagttggtgaaaaatggcaatatgaccagtctcgaccgtttaattagttggccgttggtggataacaaagttgttaccaagattgtcttggccaaccaaggtattcgcgtgccagccggtgctgaatatgcggatttagaagttgctaagcgcgactaccaagcggcctttgggcaacgggcgttggtgattaagcccaagactagtaacatgggggccggtattacgacctttttaacgcgaccatcagaaactgattttgttacagcctttaaactcgcacaacaatacgaccaacaggtgttagttgaagagtatatcgccggttcagaataccgtttcttagtcatggatcatcaggtgcaagccgtcttggaacgcgtgcctgccaatgttgttggcgatggccgttcaacaattacgcaattagtcgctaagaaaaatcgaaatgagttacgtggtgaggatcaccgcacaccgctccaaaatattcgcttaggagcgcgtgaacaattgattttgaaacaacaaggttaccaagtcgatgatgtgccaatgcatgggtcgcaggtcttcttattacaaaattccaatatttcaaatggtggggattccgttgatgtgacggatgatatcgataagagctattttgcaattgccgaaaaggttgcggaaattcttaatctgaacgttaccggtgttgatatcattattcctaatttatatcaaccgtatgatcctgaacatcctgaaatggcggttgtcttagaagctaactacaatccagcgatgttgatgcatcttttcccaatgatggggcaacagcgccgtgtgacaactaaaatgttaacgatgttgttccctgaaatggattaatttaaaaagaataccaaaaaagccgttggcattgcccacggcttttttgtgtggttaatcgaatagacgaccgaaaagcccttcttttttaggcttttccggagtcggtgctgctgatggatatttagcgctaattgcgacagtttcgcaattaatcgcgtctttggcaacgactagtaagccgattgcttctggtgcagtttgcgcagtttcgttattgaccaaagtaaattcaacttggtgtttggtaattgccgcgagataattagtggccgcgtcatttttaccattcaagagaatatggtaagccttgaaatcgggtagatggctttcaaatgtcgcttgaattgcaggttggcttaattcagcattggtgatgctgagtaagacgcgttcgcgcagagagcctaaataccgacggcgttcatcaggattggtttggggcgcgccatggatcgcactatctagatgttgttgcaattgatcgttctctgacaaaatggtcacctcatttctaatttgtgctatattagaactaaacctaagtataacatgttggaggaaaaagatgtttacacgtgctgattttgaaatttttgatgacccgactctaaaggggcgtttaaataaaatttatacggaacttgatcccaaatttgaagtatttggggcacaattacaaaatgaactagctgtagctactaaccgcgaatttacgctgcatattgccaaacatttacgccgcttcaaaaatccaccaatgaatacttggatggcgcttagcgagagttcacgtggttacaagatgatgccgcactttgaagttggcttttgggatgaccgaattttcgtttggtttgccctaatggccgaaatgccagacaagacggattatgcaccactattggcgagccaatcagaaaaactcttaagtgattttactgattatgatttaagttatgatcacatgacgaaacaaaaatttccgatgtcaccggataacttacagttgatccaagacaagtttgctaagaccaaaaaaggggagtggttgctcggaaaggtctatctgaaggacaatcctttgtttgaccaccctgaagcactaatggccgatatccaggccacattattaaagatggtgccactttacgaattaataaatgctaaataaaccaaaaaggcgctgctaaattttagcaacgccttttttgatgacaaaaaaagagccagaccgaagtctgactctttttgtttaacagataacagcttatctgttgtagaattcaacgattaaggcttcgtcgatttctggttctaattctgaacgttctggtaaacgaacaagtgaaccttttaagttgtcagcgtcaaattcaacgaatgaaggacgaccaacagtgccttcgatagcgtctttgatgataacaaggttcttagatttttcacggattgaaatttcttgaccaggttttacttcgtatgaaggaatatcaacacgtttgccatcaacggtaacgtgaccatggttaactaattgacgtgcttgtgcacgagtgcttgctaaacctaaacgataaacaatgttgtctaaacgttgttctagtaagatcatcaagttaacaccatgtttaccttcgcgaatcttaccagcgcgagcaaataagttccggaattggcgttctgttaaaccatacattaaacgtagtttttgcttttcgcttaattgcataccatattctgaaatcttaccgcgacggtcgttaccatgttgaccaggagcgtatgggcgacgggcaagttctttacctgtacctgataatgaaattcctaaacgacgtgaaagtttccactttggacctgtataacgtgacataaaaaaatcctccaataattgttttggagtaaaataatccgatgtaaacttagtaatcgttcagttcacttattaacaatcttcacctttgcagccgcaaggttacacaattgaaccaaaactctgggcaaatgaactgttgacggctttaccgtttactgctgcattattttacacaatggctagtatagcttattcatttggacaacgcaagctattttaatagttgcttggtttaatttttatacaatttatcggcaaatattgctgtatcaacggcttattcatgctataatcaagattagtttgtaataaagaaatcggttaactatttaaaaatctgagttaaatcgcaaaagggtgggtctttgaatgctttacattctcataggaatcgtagtcgtcgttttgattggctacttaggagttgctttttatcagcgttacttcaccaaacaaattaagagtttagaagaacgtaagggcgctttaatggcgttgccgattcccgaaaagttgacgaagttgcgctcactacgtttaacgggtgaaagccaacaaaactttgatcgttgggaaaaacaatataatgacattaccaatcataatttcgaagcgattgaagcttatttatttgatgcggaaacagccaatggtaagtatcaattcctattagtagcgcggattttaaaacaactacgtgcctacctacaggaaacggatcaagatttggttgatgtcaaagatgcgctggatcaactattagcaaacgaagctgatacgcgcgaacaaatcgaaacgctgcgggttaagtatcaaggcctgcgcaaacgtctgttgacgaagagcttttcatttggcccaggactagaaggattagaagccattttaggtcaattagaagaagattttaaccaagctaatgaattaacgggtgccggtgattacttaggtgccaagatgatgttacaaaaattaattgaacaaactgatgatttagaagataaaatggcacgtattccgaagcgttatagcgagttagccaatgagttccctgaacaaattgacgaaattagtgaaacgtatcaagccatgttgcgtgaacattataattttggcgataatcaattggaagtgcagctcacacaagtgacagaacgcgttgataagagtttagatttaatggaagctcttgatattgaatctgttgaagccaataatgttgaaattgcgcaaaatattgatcaactctacgcgagtttagaggttgaattaaatgcacgccaaacagttgaggaacatattggtaagactgagacaattgtgtcacacgcgcaaactcaaaatcgcgaactactattagaacttgatcatttgaaccaaagttatgccttaacgcatgatgagttggttactgctaaaaaattaacgaagcaaattaatgagcaaaaagcgatgcttgaaggccatcaaggtaagattgccaatcatgaagccgtttattctgttattgcggatgacttaatggccattgatgagcgccttactgagattgaaacacaacaaagagatattcatgaacaagtttctggattacatcaaggtgaagcagttgctaacgagaatttacaacaattcgaattagaattgcgaaatttaaaacgaaccgtcgaaaaattacacttaccaggtcttgcggatagttaccttgacttcttctttgtcgtaacggatgaaattaaacgcttagatcatgatttaagtcagattaagattaatttagacgagattgccaaacaaatggtacttattcaagatgatctagataagttgaaagtcaaaacaaataatttgatcgatagcgcgttgattacagaacaactcttgcaatatgctaaccgttaccgaattgatttccctgaaattcaaacggcttgtgaagaagcgcaagcggtctttaaccgtgagtttgattatcctaaatcagttgatattttagcaacagccttagaacgaatcgatccaggggcttatacgcaggttgaaaagaactactatagtcaaaaacaaactgatgcattataatctttaaaaaagtgggctaaaagatagcgctgatattaatcaggtgttgtcttttggcccactcttgtgtttaatgtaagatagaacactggtctttataaaagaatttgttataattaaaaaagtttaaatactaatttttagtaagaaggatcgataatgatttattttgataatagtgcgactaccaagatagcgcccggcgcgctacaaacttaccaggcagtcagcgaacagttttacggtaatccctcaagtttacacgttgtcggcgaaaaagcatttcatcttctagaacaatcacggcagcaaatcgccgatttattgaacgttcaatccgatgaaatctacttcaccagtggcgggactgaaggtgacaactgggtattaaaggggactgcgattgaaaagagtgcttttggcaagcatctaatcacaacgtcagtcgaacatccagccatcatcaaatcaatgcagcaacttgaaaagttaggctttgaagtgacctacttaccagttgataagtttggtcggattaatccggctgatctaaaagcggcgattcgttccgataccattttggtgtcaatcatggccgttaataatgaaattgggacgtgccaaccattaatggcagcggcagaaatcttaaaagattatcctaatatccatttccacgttgatgcggttcaggggatcggtaaaggtatccaaaaagaaatctttaacgatcgcgtcgattttgtaacgctctctgggcataagttccatggcccacgtggcacgggaattttatacaaaaaacgagatcgtcatcttgcgccgctactaacaggtggcggtcaagaacatgatttgcgttctggtaccgaaaacgttccggcaattgccgctatggctaaggcccttcgtttgttattgactgatgaagcacaaaaggttcaaaaacaagcagctattcgtgaacgcatctaccaacatgtcagccaagctgaaaaaacggtgatgttttcacaattgacacctgattttgcaccgcatatcttatgttttgcaatcaagggtgtccggggtgaaacgacggttcatgcttttgaagaacacgaaatctatatttcaacgacgagtgcttgttcttctaagaagggcatggaatcaagtacgttaaaagcgatgcacgttaacgaaaagattgcgacaagtgccattcggatttcattggacgaatataacactttagctgaagcagatgaattcatcaaagcctttgaccaaattaaccaccgtttcaagaaaattaattcttaaaattaaacattaagggagatattaatgcaatacactgaaattatggttcgctacggcgagctctcaacaaagggtaaaaaccgtaacgattttatcggtcgtttgaacggtaacgtgacaaaagcacttcacgaatacaagcaattaagaattcatccaaaacgcgatcggatgcacattattttaaatggcgacgatgctgaaggggttatcgaacgtttgcgccacgttttcgggattcaaaacttttcaccaagtattgaagttaatcgtgatttagattctgttaaagaaacagctttggcgatgatgaaagaaattggtaaacccggtatgactttcaaggtcaatacacgtcgttctgatcataacttcttcttggataccaatgatatgaaccgtgaattgggcggttacttatcagacgaattaccagagttagaagttcaaatgaaaaaacctgatatcacattgcgcgttgaaattcgccaagatgcgatttatttaacaaatcaagtgatccaaggtgccggtggtttaccagttggttcagccggtaaagggatgttaatgttatctggtgggattgattcaccagttgctggctacttaacacttaaacggggcgtggatattgaaatggttcatttcttcagcccaccatacacaagtgataatgctttaaataaggcgaaagaattaacggctaaattggtaccatacgttggcggaattaagtttatcgaggtcccattcactgaaattcaagaagaagtgaaacattctgtaccagaaggctacttgatgacgattcaacgacggatgatgctgcgtttaacggatcaaattcgtgccaaacttcaagggttagcgatttttaatggcgaatcagttggtcaagtggcttcacaaacgcttgaaagcatgatggcaatcaatgacgttacaacaacgccaattgtccgcccggtagcaacgatggataagaatgaaatcatcgaaatcgctaaagatatcgatacgtatgatttatcaatcatgccatttgaagattgttgtacaatttttgcaccaccagcaccaaagacgcgtcctaatttggataaaacacgtttttacgaacaacgaatcgatgtcgacgctttaatcgaacgttcacttgctggcgttaaggtaacagaaatcaaagcaggtgatcaattcttaaatcaagacgaagagatcattgccgaacttttatagcatcaaacggtccaaccagaaatggttgggctttttttgtttttaaaagaatatgaaaaaattcacaaaaatgaaagcgcttatgttatgataaatttatcaggattaataaagtgaggttagcaaaatgagaacgccaaagcatgatttaccagaagcagttgctaaacggattccaatttattatcgttactttaaactactcgaaacagatggtatcgagcggattaaatcggaacaattggcaaaattggttgccattccttcggcgacgattcgccgcgacttttcttatattggtgacttaggccggagcggttacggttatgaagtgagtcacttaattcaaattttttcagctgttttaaaagccgatattctaactaaaatggccgttatcggggttggtaacttgggccgcgccctaattgaaaacaactttagaagaaatgacaacttacagattacatgtgcttttgatacgaaccccgcattagtcggtcagactttaaatggcgtaccaatctacgccattgatcaactggcgaccgttattcccgctgctgggatcacaacggcgatttcgaccgtgcctagtgaagcctcgcaacggtcagctgaacaactaattgatgctgggatcacatcaattttgaattttgcaccgacgcgtctgcaagtgccacggcatatcaatgtgcgttatttagatttaacggcggaacttcaaactttattattatttgaggaatgaatggcctagcctattgacctttggcgtcgactcagctaaactattaacaacgcgttgaacaagagcgattaatattggactagtttagagagaagatgcatggctgagacgtcttccaatgaccaattaatcggtagcttgtgagctgttaacctgaaatttagtagggctaaccggaccatttcgttcgttaacaaatcatgagttggggactagtctagtcctaatttaggtggtaccgcgaaaaagcattcgtcctattgtgaggaatgcttttttgtttgccattaaacgcaatattcaaaaggagtgaagcagatgactgatcacaaagaaatgtcaaccaaatacgatcctaatcaagtcgaagacggtcgttatcaagattggttaaaagaagatttatttaaaccaaatgcaaatccagatgcaaaaccatattcaattgttattccaccgcccaatgttacaggtaagctacatttaggccatgcttgggataccactttacaagatatgttaattcgccaaaaacggatgcaaggttacgatgtgttatggctaccaggaatggatcacgccggcatcgcaacgcaagccaaagttgaagcaaaattagcagaacaagggatttcacgttatgaccttggccgcgaaaaattcatcgatcaagtttgggaatggaaagatgaatacgccgcaacaattcatgatcaatgggctaagatgggcttatcacttgattattcacgtgaacgttttacattagatgatggtttatcagacgctgttcgtaaagtctttgttaacttatacaacaaaggactaatctatcgtggcgaatacatcatcaactgggatccaaaagcgcggactgctttatcagatatcgaagtgcttcatcaagatgatgaaggggccttctatcatgttagttatccgttgacagacggttctggcagcattgaaatcgccacaacgcgtcccgaaacattacctggggatacagcaattgccgttcacccagatgatgaacgttacgctgatcttgttggcaagacagtcacattgccattaatgaatcgtgaaattccaattatcgccgatcactatgttgataaggattttggaacaggggcgcttaagattacaccagcgcatgaccctaacgattttgaagttggtaaccgtcatgacttaccacggattaacgtaatgaatgaagatgcaagcatgaacgaaagtgccggtaagtataacggtatggatcgttttgaagcacgtaaagcaattgttgccgacttaaaagaacaaggtttcttaattaaagtcgatccaatgacgcatagtgttggtcattcagaacggactggtgttcaagttgaagcgcgtctttcaacccaatggtttgttaagatgaaaccacttgctgaaatggctttgaagaatcaagaaacagatcaaaaggttaactttgtgccagaacgattcgaaaataccttcacacaatggatggaaaacgttcatgattgggttatttcacgtcaattatggtggggtcaccaaatcccagcttggtaccataaacaaactggtgaaatgtacgttggtgaagaagcgccagaagatatcgaaaactggacacaagatagtgatgtcttagatacatggttcagtagtgcattatggccattttcaacaatgggttggcctaacacagaagcacctgatttcaaacggtacttcccaacaaatacgttggtaactggttatgacatcatcttcttctgggtatcacgaatgatcttccaaagtttggaattcacggaacaacgcccattcgaacacgtccttatccacggtttaattcgtgacgaacaaggccgtaagatgagtaaatcacttggtaacgggattgacccaatggaagtcattgaaaaatacggtgctgatgcattgcgttggttcttaacaagtggttcaacacctggtcaagatgtgcgttttagttacacgaagatggatgctgcctggaacttcattaataagatttggaacgcgagtcgtttcgttatcatgaatcttgaagatacaccggcaccaactaaggttccagaagctgctaacctcgatttaacggataaatggatcttaagtcaattaaaccaaaccgttgctgacgtgacccgtttatacgaaggctttgaatttggtgaagctggtcggacattgtataactttatctggaatgatttctgtgattggtatattgaaatggctaaagaagtgctttatggtgatgatcaagaagcgattgccaataaacgctataacttagcttacgtattggaccaaacattgcgtctattacacccagtaatgccatttgtaacggaagaaatctggcaaagtatgccacataccggcgaatcaatcatgaccgctagctatcctgaagtacatgctgaattagatgatcaagaagcaacaactcaaatgaacgctttgatcgacttaatcagaagtgttcggaatatccgttcagaagcaaatgccccattaagtaagccaatcgatatcttaatcaacatccaagatacaccgttgatggccatctttaagcaaaatcaagactttatcgaacgtttcgttcatcctaagtcacttgaaattgcagaaggcctaacagcccctgcattagctaagacagccattatcagtggcgctgaagtttacgtgccattggcagaactattggacttagacgaagaaattacgcgcctagaaggcgaattgaaacgtctaaacggcgaaatcaaacgcgcacaaggtaagttagccaataaaggcttcactgaccgcgcccctgaaaaagtcgtccaagaagaacgcgataaacaagctgattatgaacaacaatatcaatcagttgaaaaacggcttgcagaactaaaagcagctcgttaaagcacatctcaaaacgccaccttattttaaggtggcgtttttgtatgccatcagtttttggcaaccgattaacggtcaatctatgctaaaatggagggagcatgttaaaggggattgagcaatgttggtgacagattacgaaacagctttggcgtatattcattcacgaccaagattacataaagaagcaaatttaaaccgaatgacccagttattagcggcactgggtaatccacatcagggacaacagtttattcatgtgacaggcaccaatgggaaaggctcagtagtcaatatggtcagtagcttgctggtcgaattgggtttaaaagttggtcgctacacatcaccatttattactcgtttcaatgaacgcattgcgattgatcaacaaccaattgcggatgacgatctggtcgcagttacgcaacatgtgcaacagacaattgaaacagttcaacaagcagacaccacttttgaagtgacggaattcgaactgattactgcaattatgttcacctatttcaagcagcaagcagttgatattgcggtcattgaagttggcattggcggcttatacgattctactaatgtcctaacaccattgatttcggtaattacttcggttgggctagatcatcaagccttgctgggcgatacgttggcagcgattgccacccaaaaagccggcattatcaaagcgcaacaccctgtagtgattggcaaattaccagcggaagcacaaaccgtgattgttgaaacagccaaacgattagcaagtccactagcaattagtggggtcgacttttcgacaacagcggttaaaaccttaccaacttgggggcaacagttaaactttcagaatcaaacggtgacacttaagcaacttcaaataccattgatgggcgattatcagattgaaaatgctgcagtagcgttagaaaccttttgtcagtatctagcgttgacgcagcagcggcttgatattaagacgcttaagcggggcttggctcacgtgagttggccgggccgctttgaaaaagtaaatgatgaaccgctgatcatcttggatggggcgcataatccagccggcgttgagcagttggttaaaacagctaagcatcaatttaaacatcaagatatttacattttattcggtgctttgggtgataaatcactggctgggatgttaccggaacttaatcagttagcaacccacttagtattaacgacggtgccggacaatccgcgagctgctacccaggcgcagtacgcggcagttgataacacgattccatttgaagcggattggcccgtggcgttaaccacaatggtcagtgaattatcggccgatgatgttttattggtgaccggttcgttgtacctaattagtaccattcgtagttattttaaaggagtgtcatagatgcaaactagagggattatttttgacatggacggcttattagtcgattcagaaaaagtttattatcaagctaaccaattagcagcgcaaaaaatgggctttgaggtgacggcagaagatcatcaagccattctggggacgacagatacttatttacgccaatatttcttacagaaattaggctcaccggaattagtgaagcagtttattgatttgtcttatagaacagttgatgaaattattcaagaccaaggggtagccattaaaccggggttagtagaattattggactactgtgacaatcacgggattaatcgggtgattgcttctagtaattttagaacaatggtcgaagatttcatgcaaagcacagggttaaagccccgtttcaaccagattgtctcgggcgatgaagtgacacacggtaaacctcatccagaaatctttttaaaggctttagataaacttgccattccagcccctagcgctttagtactcgaagattcaccaaatgggattttagcggctagcaaggctgacattccagtgattatggtgccagatttgattgccccaactgccattactaaccaacaaacattggcaacggttgataatttagcagccgttattccgtttttagaaaaataaaggaccagttaacacgtatagttaaatgaatcgaaaaggcgattaaaaatgccttttgcaggaggctatgacgatgttaacgagtcaatcaaagttacaacccagagagcaagtcgcactgtatggtgcggccagtctaagtgatgaacaattagcaaccgtaattttacgttcaggcacccaacatttacccgttgaagtcgttgcacaacgattattgcaacggtaccccgactttcaagatcttgagcaagcggacttagtacaattacgtcaaatcgaaggtattggaccggttaaagcgattgaactccaagcgatttgtgagttaagtcggcgcattcaaaatcagcggacattacgttttggtgtagtggcttctagtcagatggtaggccaacgaatgattgaatccttagcgggagagacacaagaacagctattagcggtctatttagatgttaaaaatcagattattcagattaagcaactctatctgggcacacttaatagttctgttgcacatccgcgggaagtcttcaaatgggcggttcagtattcagcggctaagtttatcttggtccataatcacccgagcggtcaattggcaccatcaacgcaagatattaactttacaaaaagaattgttaattgcggacagttgatggggattacttgtttggatcatttaatcattggtagctcacagtacttaagcctacgtgaagaagggtatctagtcgattaaaggtgttttgaatcttgttaagaatctattaattttaaggtagacttgaaaattctcctgaaaatcaggtaccatgaagctacattgcgttttttattattaaaaattatgatataatgccaatgactataaaaacgtttggttattgaaggagagaaaaatagtgttcggattagggactagaaatattggtatcgacttaggtaccgcaaacacacttgtatatatggacgggaaagacattgtcttaagagaaccctctgttgtcgccaaaaatacacaaacaggcgaagtcatcgctgtcggttccgaagcacgcgacatgatcggccggacacctggtaatattgtagcgattcgtcctatgaaagacggcgttattgcagattatgatacaactgcagcaatgcttaaatattttatcgaaaaaacaatcggccattcatcaagcaagccatttgtaatggtttgtgtgcctagtggtgttacagaagttgaaaaacgcgccgttatcgatgccactaaagttgccggtgcgcgtgatgcttatgtaattgaagaaccttttgcagccgcaattggtgcaggacttcctgtaatggatccaactggtagcatggttgttgatatcggtggtggtacaacagatgttgctaccatttcattaggtgggattgtctcaagtcgttcaattcgaatggctggcgataagtttgacgacgcaattatttcttacatccgtcaaaacagtaacctattaattggtgaacggacagctgaacaaatcaaattagcgattgcttcagcttcaccagaacgtgctaaagaagttgaatcaatgagtgttcgtggccgtgatttagtcactggtctaccaaagactgttgatattaaagcaagtgatattgccgaagcaattaaggaaattgtgacagcaattatcgatgctatcaaagaaacgcttgaagaaacatctcctgaaattgcagccgatgtgattgatcacgggattgttttaactggtggtggtgctttattgaaacatttaccagaagttatctctgatgctactaaagtacctgtcttcattgcccaagatccattggactgtgttgcagtcggtactggtgaatcattgaagaatatcgaagtcatgaaaaaaaattaagattagcgtaaaatagtgggacaaagagcggttagcgtttaagtaggcctaaattagtgattgattcaggtttttttgaatcaatcgcacaaggcccttaataaccggtttttgtcccatatttacgatattaaagatggatggtggcgaataaaccatgcaaaaattcttttcaaataaaaagttaatcattttattggtgacattaatcgtctgcatgggctttatcgcaatgtcagttggcttgcgtaatagtaagaagagtccaagttttatccgtcaattcggaaacgatgtgacaggcattacaaaccaagttgttagtgtgcctgctaatgggattggtaaaggtgtcgatgcactgacagacttaattaatacttatcaagaaaataaagccttaaaagcgcaattagatgatttagcacaaactaaggtccaagcacaaactttaaaagaagaaaacaagaacttgaaaaaagaattaaacttagcagggactttaacagactatacgacgctcaatgcttccgtgttgtcacgaaatccggataattggcagaattcactggtgatcaataagggtgctctagcaggccttaagaagaatatgccagtgatgtctgaatcaggcattatcgggcggatttcagaagttaataagaccaatgctaaggtggaactcgtttcaagcactggtcgtaacagtaatggttttgccgcggtggttaataccaaagatggtaaacaagttaacggtattatgacgggctataattcagataagaaacaattgaaattaggtcaaattaaaaccgatacagcgattgctaaaggcgataaagttgttacttctggcttgggtggtttaacacctaaggggctttatttaggtaaagtagcttcagttaaaaaggacgactatggtttggcattaactgtgtatgttacgccagccgctgatctgaataacttaacagttgtgacggttatcaaacgttcgattgaaggtgagtaatatggggacatttcgcttgaaacatcgctatttaatcccaatttacttactagtcgctttttacctggatggtgcgattagttcattaggggaacaatggctatatacgccagatcataccctaattagtcggttacccatgttaatgtttatcatggttgcgtttgttctacctgaagagacgaatttatcatggtatgcagtggggattggtcttttgtatgatttatattatacggggatgattggcatgtatctttttgtattgccactgattatttatatcgtgcgttacttaaaacaatacattccagattcaccattctttattgggttagtcgacgttatttgtttaacgttgttggaggcctcaatttatattatgaatcggctcgttaatttaacgagtatgacaccagttgatttcattagtaacgttttagcaccgacaattgcattaaacttagtcttttttatctttttgtatttgcctttaaagaaattattgctaaaattaaaatcagaacgatgaggggtttgatttttttatggatgcagtcacgttaagaggacgcaaagaaggattcgaattaaacattgatgctggtgccgattttgatcaagcattagattcaattgtcgcattattgagtaaaattcgctcagaacaacctaatttgggtaatgataagattgaacttgagttaacaactgggatgcgcttattaagtgaacaacaaaaaaaggcgctatatcaaacactagaatcattccctgagtttgatattatgagtattcagtcttcggtaatgacgattgagcaagtccaaattgaacggcaagaaaatagtattcatgttgaaccgaatgttattcggagtggacaagaagttaactatgtcggtgatgttttatttgttggtaatttacaccaaggggctgtcatcaaagcgacggggagtattttcattctagggtctgttgcagggattgtgcatgctggttttccagataatgcagatgcaatcgttgctgggaacctgacggaagctgtccaacttagaattgcagatgcggttgaaattatcgatccaaagaaaacgccctttaattcacaaagtatcagttatattaacgatttacacgtcatcgattacggtgagataacggatttaaaacaaattaatcctaaactatatcgtaaaatggaggagcaataaaatgggaacagctttggtcatcacatccggtaaaggcggtgttggtaaaacaacttcgagcgctaatattggaacggcgcttgcgcttttggataaaaaagtttgtttgcttgatttagatatcggtttaagaaatttagacgtcgtcttgggattaagcaatcgaatcatctatgatatcgtggatgttgccaaaggccgtgccaaattacatcaagcgttgattaaagataaacgctttgatgaaaacctctatttattaccagccgcacaaaacacggataaagaagcactcgtaccagaagatgtcacagtgattgtgacggctttaaaagaagaatttgattttgtcatcattgattgcccagccggaattgaatcaggctttaagaacgcgattgccggcgcagatggtgcgattgtagtcgcaacgcctgagatttcatcagtaagcgatgctgatcgtgttgttggtttgcttgaagaaactgaaatgcaaatcgcaccacgtttggtcatcaatcgcattcgtcgtcatatgatgaacgatggtgaaacaatggacgtcgatgagattacaaaacatctttcagtatcattgttggggattgtttttgatgacgacgccgttatcaagacatccaatgctggtgaaccgattgtcttagatcctaagaactcggccagccaaggttatcgcaatattgcccggcgcctattaggtgaaacagtgccattaatgacgttgaaagaaaagaaaatcggtttttggggtcgactctttggtaaaaaatagttgacttttcaagtgagaatcactagaataatgtcaatacttaaaacgttgaacggaccaaattagtttttaaggcacagagagctgaggtatggtgtaaatcagcccttcgaaactagtggcacatccgtgagttgattatctgaacgaagtaagataatccgttagcccgttatcgctgtagttttagaaactacataagtttaagcaatgtgagttgtttattaaactgaggtggaaccgcgataatattcgtcctcttggagtaatccgaggggactttttttattggtctaaaactagtagagttgtttgctgtgaagtaaacaaaaaactgaggtggaaccgcgattgatcgccctcttgacgtgtaaacgtgaagagggctttttttgtgcaatgtttagctaacacgctttgaaggatatgtttatataagggagattttatcatgcaatatagtttatcgattttaccagcgcttttgagtggcgctaaaatgacgttagccatttttagtttaaccgtgattggtgccattcccctggggttattattgagccttgggttattatctaaattcaagccacttcattatttgcttaacctgtatgtttggctaatgcggggaacgccattgctattacaattgatctttgtcttttacggcttaccggtgattgggattgtctttaatcgtttcgacgccgcattgattgcattcatcttgaattacgccgcttacttcgctgaaatcttcagaggcggctttcaagcggttgatgatggtcaaatcgaagcagcatcagttttaggattaacctatccccaaaccattttaaaaattatcgtgccccaaacggttaaaatcgttttaccgtctgtcggtaatgaagtcattaatttgatcaaggattcatcattagtttatgtgattgggattggcgatttattacgggcaggaaacgttgccagcgcgcgtgatgttaatttagtgccattgctgttagtgggtgtgatttatctcgcattaaccgccatttgtacatggttgttaggccgattagaacaatattatcgttattaccgttaggaggacttatcgatgtttaaattagaaaatattaatcagtcattcaaaggtcgccaaattttgaatgatttaaatttagaagttgaaacgggcagtattttagcaatcgtgggtcctagtggcgccggtaaatcgaccttgctccgcttaatcagtgggttggatcaaccagacagtggccggttcgtgatcgacggtgaaacctatgtcccaagtgccgctgaaaaagggggccggataggtgttgtcttccaagatttccgcttattcccgcatttatcagtgttagaaaacgtcacgttagcgcctaagatggtgaagcaattggctaaggacaaagcgaatgcattaggtcagcaattattacgccaattaggattaagtgcacaagaggctgcttatccatttcaattatcaggtggtcaacgacaacgggtcgcgattgcgcgcgcgttggcgatgcagccggatattttgtgctatgacgaaccaactagtgccttagatccctcgttagtcgctagtgtggcagaattgattttaagccttagggaagacggcatgacccaaattgttgtcactcatgatattcaatttgcgaacaaaattgccgatcaagtttttgaattacaaccaaatgaggccaaccaatgatgagattaaagagattagcaacagctggtttattattaggcctattagtcagtctagcgggctgccatagccgccaaaagaccgatagttgggcaacgattgaacgccggcaaaaagtagtgattggcatcgatgatagctttgtaccgatgacttatcgtgaaaaaaacgggcaactaaccggctttgacgtcgagttagccaaggcgatttttaaaggcagtggcatccaggttgattttcaatcgatcgattgggatatgaaagaaactgaattgaacaatcaaacgattgatttaatttggagtggttattctaagaccgaagaacgggccaaacgagtggccttcagtcaaccctatctcacgaatcatcagatgattgtttcgatgaaacaaaacccagtgaatcgcttagcggatttgaagggccaaaatttaggcgttcaaaccggttcttcggggatggcacaactggatcgtcgaccaactgttttaaaacaaaaaattgccaatcaaacgccaatcctatatgatacctataacaatgcttttatcgatttacaggctaagcggattaaagggatcttaattgatcaagtttatgctaactttgagattaaagcgcgggcaaatgggcaagattttcaagcgattgaaagtccttttgcggctgagaagtttgcggttggcatgcgcccagaagatcaaaaattacgacgctttattaatcgccggtatcaagtcctcaaacaaaatggacaattagcgaagattcaagccaagtggtttaaagaataggacgcgacagagatgacgacgattattatcataattcttagtctcatattagtaattaatacaatcggtgcgattattaccgtttttcgacaatcaagagatattgcggcgacttgggcctggctactcgttttaattttattgccagtgatcgggtttggtttttatctcttttttggtaagaaattatcagcagagcacctttatgatttacggacacaggccaaattaggcattgatgaacgcgtgacgcaacaaaaagcggaattacggcaacgacgtaagcaaaatcaccattctacaacgccggagattcaaagcttaattaatctcttcctagtgtctaatacagccgttttgacgcaagaaaataagatatcggtcttaacggacacaaccactgcccaagagcgactactggccgatatgagccgtgctcgcgatcacatccatttagaatactatgcttttttcgatgatcctttcgggcacatcttaattaagacgctcgcctataaggcatatcaaggggttaaagtccgcgtcatttatgacggctttggttcgcaaaagattccacgctctttttttaaaccattagaagaagcgggtgggcaagtaacgccctttttcagttcgcggtttcgtttgattaattttcggttgaattttagaaaccaccgccaattagtcgtgatcgatggtaacacggcctatcttgggaactttaaccaacatagtgttgatacgcatttgccagttcgagacacgcgcttacgaattagtggcgacggtgttttatcgtttcaatcacgtttttttatggattggaacgcggcaacacaacgccagaaggtttattacagtcagcattatttcccgacttctgtcgaacatggacaaactagcatgcaacttgtttcgggtggccctgatcgcgatttacctgaaattaagcttggttttttaaagttaattgcggccgctaaaaaacggttatggattcaaaccccattttttattccggacgattccgttttggcagcattaatacttgccattaattcaggggtaacggttaaaattatgattcctgaaaaagcgaaacatagtttagtccaacatgctaatctctactatgctaggcagattgttaaagcgggcggacagatttatctatataaagcgagtgcttttagagcacggacgatgatggtcgatggtcagttatcagctgtgggaacagctaatttagatattcgcagcttcaaacttaattttgaaacgaccagctttttatatgatcctgcattgaccaatacgttggaattgacctttcaaagggatttaaaagcaagtgtaccgctgactaaacaacagttaaatgcacaaacaacaaatcagcgactctcgcaagacttggctcggttgttggccccgatattataaaagtagtcataaaaaggccctcgaaaaatttcgagggccttttttgatagtgattatttgaaatagttttgtaaaccagcgtaaacggcatccgccactttttcttgataactactactactgatgtaattaaagtcttgatcagaattgatataacccatttccaatagaacagaagggcgttcgttatcacgaagtacttgataattaccgtattcaacaccacgattagttagtggtaatgatttaatctgattattaagcgcgttggctaagctagtgtccttactatttgagtaataataagtagttgtaccactcgcttggttagattgcgcactggaatcaaaatgaatactgataaaggcatctgcacgtaatttattagaaagtgcaggccgaggtgctaaatcaacgaatttatcagacgaacgggttaagacaacgttggcgccggcggcttttaacttcttagcaatcgcatcgacggtcttaagcgtataagtcttttcgtatttattactatttgatagcgccccaacatcgttaccaccatgaccggcatctaaaacaatggttgcttcagaaagggaggtagcacttgttttaacgacttcgttcttagcagaaggggtgacgacccaactggcgacataacccgtattgccgtccgcgtctttaactttgtaccaagtgtcgctcttatcgagatacgttagcttcgtgttggcggaatagacttgagaataggcgtagttgacacccgggccgctgcgcaacttagtgttatctaattgcgttgttacggatttaatatcagaggtggactgactactactatcatctgttttcgtatccgtttgaacagctgttggtgcttcgttagaaatgctgatcaggtcactttggacccagccaacagccgaattatatttaacttggctccaaccgttttgttggtagagaaccgttaacttatcgcctttattgactttgcctaacagtaagctgctggcattgctgctttggcggacgttagcaaaagagttggtgaccgttgcgacccggttagaggttgcactgacttctgtattattaaccaaccaactggcaacccagccgattttatcaccacttaggcggacttggtaccagttattcttttgtgaaatgacgttcatcacttcgcctttgcttgcctggcccattgtatcgtaggaaaggccgggtccttggcgcacattaacgacgtttgctttaatggtaatttgttggtacgttgcaaggacgtgtgtcgcgaagagaccgacaccaactagaatgaataatatgagaacggcaggataccgctttatccagttcaaaggtttttgcatatcttcaacacctttgtcatttatttataagagcttcatatggttcattatagcaaagatagtggatatctaaaggggttgacccttaaaaattagaaaaaattcaggaattattgacttttttttcaaataacgttaatctaatagcaacgagaatatgagatgaccagtgataaagtatggtaaacgcaccacttaacagagacgatttcaaagctgaaagaaattgacggtgtccacctgactgcttttgaggtctgcgtgtctaacacgccgttggctaacaacgttatgcttaagcaaaaattaaggtggtaccgtgcattcaagcacccttgttcaacaacaggggtgtttttttattgggtatctattggaggaatggaacatgggttatcaaaagccaaaaggcacagccgatattttgccaggagaatcagatcaatggcaacttgttgaaaaaacagcgcgcgacgtttttgcgcgttatcaatttaaggaaatcagaacaccattattcgaaagctacgatgtcttttcacgaagctcaggcgatacatctgatattgtcagcaaagaaatgtatgatttcatggataaaggggatcggcatattgcgttgcgcccagaaggcacagccggtgttgtccgcgcctttgttgaaaacaaattatatggtcctgaacatcaaaaaccttacaaggtgtattacatgggccctatgttccgttatgaacgaccacaatcaggtcggcaacgtcaattccatcaaatcggtgtggaatcatttggttctgaaagtccagcggtggatgttgaagtcatcagcatggcaatgcgtctattacgtgaatttaagatcactgatttgaaattagcgattaatacactaggcgatgctgctagccgggctgcttatcatgaagccttagttaactacttagaaccgcactttgaagaactaagtgatgattctaaggtccgtttacacaagaatccattgcgggttcttgatagtaaagatgcgaaggatcaagaaattgttaaagatgcgccagtcattcttgattatttaacggatgaagctaaagtgcatttcaatacagtgaagactttattggaatcattaaacattccatacgaagttgatactgaaatggttcgtggtttggattattataaccacaccatctttgaaatcatgacgaacaataaagtcttgggtcgcggctatacaacggtcttagccggtggtcgttacaatggtttagttgaacaattaggcggtcctgacatgccaggtgttggttttggccttggtgttgaacgcttattattattgatgaacgctcaaaatagtgacttagtagcggcacctgttttagatgcctacgtggtcgggattggtgctgaaacgagcgcaaccacactccacttggttgaaagcttgcgggaagctggtttaacggctgatcgtgattatttagatcggaaaccaaaagcccaatttaagacagccaataagttaaacgcccaatttgtggtaacgattggtgaatcagaattagctgataagacggcccacgtgaaggatatgactagtggggttgaaatcacagtgccattgacgacgctagaagccgattttgcagcagttaaaaatgaactaaaagcacaagaggagaatgcataatgaaaacaagaacaacttacagtggtttagttgatgaaacgtttgttggtcaaacagtcacattacatggctgggttcaaaaacgccggagtttaggtaatttaatcttcgttgatttacgtgatcgtgaaggtttagtgcaattagtctttaatcaagataatgctgatattttagcccttgctaacactttacgtaatgaatacgttattgaagtgactgggatggtgcaagctcgtgatgaagcggctattaacccagacatgaagactggtaaagtagaagtcatcgttagcgaattaacgattttaaacgaagctaaaaacttaccttttgaaattaaagatggcatcacaacttctgaagaaacaaaattaaagtatcgctaccttgatttacgtcggccagaaatgcaacaagcaattattcgccgttcacaaattacacaagcagcccacaaatatttggacaataatggtttcttaaacatcgaaacacctgatttaacacgttcaacaccagaaggcgctcgtgattacttagtgccatctcgtgtttatcctggtagtttctatgccttgccacaatcaccacaagtcttcaaacaacttttgatggatgctggctttgatcgttactaccaaatggcccgttgtttccgtgatgaagatttacgtggcgaccgtcaaccagaatttacacaaatcgatgttgaaacatcatttatgagtgctgaagagattcaagaacaagcagaaggtattatcaaacaagtcatgcaagatgttatgcatattgatgtgccaacgccattcaaacgcatgaaatggcaagaagcaatggatcgttacggttcagataaacctgatattcgttttgaccttgaaattcaagacttaactgaaatgatgaaaacaagctcatttaaggtcttcagtgacactgccaatagtggcaatctggtccgtgcaattgtcgttccagaaggcgctgctaagtactcacggaagatgttggacgaacaaacagaatacatcaaacgttacggtgctagagggatggcctgggtcaaagtggttgatggtgaattgacaggaccagctgccaaattcttaaaagaacaagaagctgaattacttagtgccttatcagctaaagatggtgatttagtgctctttgtcgctgataaattccaagtggtctgcgatagcttaggctacttacggaaacactttgcacatgacatgggcttagtagatgaatcacaatttgcctatctttgggttgttgattggccattatttgaatacgatgaaggctttggtcgttggattgcagcgcaccatccattcacacgtccaaacgatagcgatgttgatttattggaaacagatcctcataaagcgcatgcgcaatcatacgacattatcttaaacggttacgaattaggtggcggttcactccgtatctaccaacgtgatatccaagaaagaatgttcaaggcgcttggtatcagtccagaaacttatgaagaacaatttggtcacttattaagtgccatggattacggtttcccaccacatggtggttttgccattggccttgatcgttttgcaatgttactcgcaggccgcgataacattcgtgacgtgattgccttccctaaaaactcacatgcttcagaaccaatgacgaatgcgcctagtcgtgttgcaccagcacaattagatgaactcggcttagaagttgaaccagaggttgaaaaggattaattaaatactcaataaaaagggctctccaaatggggagtccttttttgtgagcatattaatcgctaattgcggacatccgactataataataaccacgaaggagtgatggataatgagcgatgatttacgacaacaattaacaccagaacagtatgtggtgacacaggagaatgcaactgagatgccatttagtggtgagtacgatgaatttgatcaaccaggtatctatgttgatgttgttagtcatgagccgctatttagttccttagataaatatgatgctgggtgtggttggccctcatttacgcgacccattgttaaattaaatgaaaaacgagatcgaacgcacgggatggaacgtgttgaagttcgtagtcaaaacgccgattcgcatttaggccacgtttttacggatggtccgcaagaacagggtggtttgcgctattgtattaattcagcagccttaaagtttatccccaaagatgacttaaaggctgcagggtatggcgagtatctcgcattatttgaaaaggagggtcaataatggcaactgaaacagcaatttttgcaggtgggtgtttctggtgtatggtccatccgttcgatcaacaaccagggattcttaaagtggtctctggttacaccggtgggcacgtcgctaatccaacctatgaacaagtttgttcacatacaacggggcataccgaagcggttgaaattacgtttgatcccgcagtgatttcgtatgctgaactagtcgaaatctattggcgccaaacagatccaacagacgcgatgggccaatttcaagatcgaggcgatagttatcggccagtgatttttgttaattcagatcaacaacggtcaattgctgaagcatccaaagaaaaattgattgctagcggtcgctttaatgaaccgattgtgacacaaatcgaagcggctaaacccttttatcctgctgaggattaccatcaggatttctataaaaaggaaccttggcgagcagaattaggggaagtcaagcgaaaagccttcattcgagaaaaatggtcggattaattctaaaataacctttagtattaagggtttgtgtgctagaatgaaagacattaaaacgaatgataggtgattattaagtggacgatctagcgcgaaaacatcagaatatggccaaagtttcggcggctatcttatatgggatttgtgtgtcaattgcattgaactttttctgggaagaaggcggcgtatacgcctcgggcattaccgggttcgcgcaatttattcataccgtgacggcgaagtttatgccatttctaccatttccattatcaacttccttgatgttattcttgctaaacgtaccgctttttgttttagcttggtttaagattgggcatcactttacaatttatacgtttatcgctgttatcttttcaagtttaatggtccaaattatgccgttgacccagttgacggataatccaattatctgtgcgatttttggggccgttattaacggttttgggaccgggatggccttgaaaaatgatatctcaaccggtgggttagatattatcggaattgttcttcggaagaagacaggacgttccgttgggaccatcaatattattttcaacgttgcgttagtctttgccgcaggctttatttttggctgggaacatgctttgtatagtatcttgagcatcttcgtcaatggtaaggtcatcgatatggtctatacacgtcaacaaaagatgcaagtgatgatcattacggataatcctaaagtcgtgattcaaatgattcaagacgagatgcgtcgcgggattacgattgtgcatgacgttgaaggggcttataaccgcgaagaaaaaacgatgttatttactgttatttcacggtttgaaatgcatgatcttgaaatggtcatgaaagaagccgatgaccgcgcttttgtcagtattacagaagcggttaagattctgggacatttctacgaaccaaaaattaaataactatcaaagggtcgtcaatattaaattgacggctcttttattttctgaataggcgtttatcggctaataaccgtgctctttttcgcttgctttttattctggtatctgtgacaatcgaagtaattatgatagttggaggtcacgcgatgttattaggtagtcacgttagtatgaagggtaaggaaatgctgttaggttcagcacaacaggcagcagaatttggggcaaatacattcatgatttataccggggcacctcaaaatacccggcgtaaaccaattgaagagttgaacattccagcagcgcaagcattaattgcagccaaaaacttagggccaattgtggtccatgcaccttatatcgttaacttaggcaatacggtgaaaccagaaaactttaaatttgcgattgaatttttacagcaagaagtcattcgagcggaagcgctaggcgcaagtcagatcgttttacatccgggtgcgcatgttggtgcaggtgcagatgctggtattaaacagattattaaagggttaaatgaaattttacgaccagatcaaacggctcaaattgccttggaaacaatggctggcaaaggaacagaggttggtcgtcgttttgaagaaatcgcacaaatgattgacggtgtcacactaaacaataagttgtcagtaacgtttgatacgtgccataccagtgatgcgggttacaatattcgcgaggattttgatggtgttttaaatgaatttgatcatattatcggtttagaccggcttaaggtgattcatttaaacgattctaagaatccacaaggggcgcataaagatcggcacgctaatattgggtttggtgaaattggctttgacgctttacatggtgttgtaacccatccgcagcttgttgatgtgcctaaaattatggaaacaccatacgttggtgaggataaaaaacataattttgcgccatatgcatacgaaattgcgatgctcaaaaagggtgaatttgacccagatttattaacgaagattgagcagaatgaaggtcgattatgagattgaaacgttctcgctatctttggctagcgctaatcgttttaccggtattgttattgctagttaaaccggtgcaagcagccgatacgtatgatattagtcgctatcatgttcaggttaacgtccaaaaagacggtagtgcacaagtagagcaaaaaatgaattttgatatccaagatgatattaacggtatttatctcaatcaaaatttacaaacaacagttggtgagcctaaaaagttggtgcaaccacaagtggccgttaatggccggactttccaagcgagtcaatccgaaacggcgggaacgtattcgctaaccaatgataatcagaagtatcgcttcaagctctaccaaccagcgacagaagatgatcggttagcagtcactttgaaatatcagttacaaaatctgattattaattatcaagatactgctgaattgaactggaaagtgattggggatgcctgggacagcagtctgggtgatgttcaagtcacgattcaattgccaacaaccctgaaacagtctgaattaaagtcgtggacacatggcgatttagatggccaacagattgttgatccggcaaaagggcgggttaccatcaaaatgacgaataatccagccaatcaatttgttgaatcccatcttattttcccaacttcagttaccccaactaaccccaatcgggtggctaaaaagcaacgggcaaccattatcgcacaagaagcgaaacgggctgaagaagccaatcaagctcgtcaggcccaagaacgatggtattgggtactttcggtaattgcggtggtcttagcgccggtcttattgctagtggtttggtatcgggtaaaacgggcattgcctcggatgcattatcagggtcatgcgccagaacacgtctacgatttaccagatgacaatggtccagccgttatccgttatctattagcattgccaatgacggaaaaagcaaaggaagaaagtttatcagctaccattttagatttggtagcccgaaagaatatcacaatcgatgtccaaacacctgaaaaacaggtttttagaaaagcaaaaccacaattcacgttaactttattaaatcgcaatcgattatcacgttctgagcaaaaattagtgacttggttattcgatgtcattggtaacggacaacaggttagcctttttgaaattgaaaagtatcctaaacgccatagtgaaaaagtctttaatcaacattatcatggttggcaaatgacagttgaagatgaagccaatcaaagtggttggctacgcgagcgtgtttttgccgttgcaactagtttaaattattggttgataggacttggtacactaaccgtgattttaatgctagcagcgttaatcgaagtcgtcgcttggtggacgattttaccaatgttgttggcctttcttctgacgggctggcagaggatgcgattgcaattatggacgcaacacggttatgaaaaacggggcgagtggttaggttttaaacagatgttgaaagatatttcgacacttgatatggccaatgtaccagacgtgatgctgtgggatcgttatctgagttttgcaacggcgttcggagtagccgataaagtggttaaagcgctgaagattaagttgactcctgagcaactacagacaatgccattaggttattattattactacggctatactggtggcctcaatattggccaatcctttacaagtgccctaagcagtagtgtgaatagtgcggtcagtgctgctaatccaaccagtgtcagtggtggctctggcggattctccgggggttcatcaggtggttttggtggcggttccggcggtggcacattctaacaaacaaatgattatgatattcccattaaacgtggtatgactatatggaaaaaaatacaaagtataagtgataccggtttaaaataagggaggcaccaacatggaattcaacgatgttattaataacagaaagtcaatccgctcgtttgatcctcacaaaacagtatcagatgaattaattaaaaaaatcattacctcagcacaacgcacaccatcgtggacgaattcacagccttggcgagtttacgtggcaactggtgaaacacttgctagtatcaaatcagatcaccatgaacggacgcaaaataaggttaagggcaattcagacttagcagtgattcatcgtgctgactggggtcagatgatggctgaaaatagtcgggtgtggaatactgaaatcagtgattatttgggtgaggcaggtttggcagcatttagcgatttacaaatgcatctttttaacgcaccggccgttatctatttgaccgttgagcgcaaagtctcaccgtggatgatttatgatatgggcgcctttagccaatcgattttactggcggcgtctaatgaacaggtcgatacgattccggcttatgagacagctaaatatccggatgccattcgtaaaattgtgggcattcctgataatgaagtaattattggggggattgcgatggggtatcgcagtgagggcaagattaaccaattccacgctaaacgaagtccacttgatcatttcttgacgattaaacattaaaaaagacctcggacaaattaaattttgtccgaggtcttttaattgggattaattaacgtgatctgtcgagctgcttgcaaagtccaagccagtttgttcgagaatgatagccgctgtttcttcgattgagcggttggcgacgttgatgacttggcaaccaattttatcatataaatcttgtgcgaagtctaattcagccttgatttcatccatgtcagaataggttgtgtcgggatttaagccataggcaatcatccgttcacgacgaatgttatttaaaacttcaggtgtattcatcaaaccgataatcttcttaggatcaacatgccatatttcgtctggaatgtgcgcctgtggcacgattggcaagttggcaaccttgatgttccggttcgctaaaaacagcgacagtggcgttttagaggtccgagagacccctaacaagacaatgtctgcctctaagaagccatggggatctttaccgtcatcgtacatgacggcaaattccattgctgaaatccggtcaaagtaacgatcgtttaaatgatgaagtgcgccagcctcaccggatggggctaaacttgttttagcagtaattaattttgtgagcgggctcatcatatcaaatgacgcaatttttttagcatcacagtaattctgcgcgatttcagaaaggccggtcgttgctaacgtatgaacgacaattgtttcttccggaacagccttacttaaaacgtcggttaatttatcaacggaatgtacaaatggaaaacgaataatatcgggtttaacgtttggatattgcgctaaggctgcttgcgcaagttgtaaagcggtttgaccaactgaatctgagaggacaaaaaccgttaagggggtagactgtgacataataaaactccttttcgcacttttatagcgctatcatatcatatttgggcaaaaagcggcgatatttaaaaaaagttttaattaattgcccgtgggttattgaccgtattttcaacattcgctataatagcaaagaacagtttatgtgaaacccattttttgggtgcgcgtaaacggttatacttagcacgcgaggggagggatatcatatgggcaagacagtcgttcgcagtaacgaatctctagatgatgctcttcgtcgcttcaagcgttccgtatcaaaagctggtacaatacaagaatatcgtaaacgtgaattttacgagaaaccaagtgtaaaacgtaagttgaaatcagaagcagcaagaaaacgtaagaaattctaatttcttcataaaggaaatgattgaatgagtttacttgaacaattaagttctgatttgaaaacggcgatgaaggccaaggataagttgcgactaacagttattcggagtttaaagaccgctttaactaacgcaaaaattagtgcagggcaagacttatcttctgacgaagaactaagtgtattatcatcacaagttaagcaacgtaaggattctttagctgagtttgaaaagggcgatcgtgcagatctcgctgaacaaacaaaagcagaaattgaaatcgtacaagcttatttaccagaacagttggatgaagccgctgtgattttaattgttgatgaagcaatgcaggcaacaggagcgacaggcaaggctgactttggtaaggtgatgcaatatgtaatgcctaaggtcaaaggacgagctgatggcgcaatggtcaatcaagtcgttaaatcaaaattgagttaatttttggtaggacttcccgcgggaggtcctactttttttgtggcaaagacgtacttaaacaaggaaatcagtcaattttccccctttgtgattataatgtcgttataattgaataaatagcgcggttgtctgcttttaaaaccgggcttgattgtgatagaatgaatgtagttttcatcttgaaaggatgaatcgtgctattggaagttggttttgacactttcaaggcagtttgattttgaaatgtatttagatgaataaactcatttaaacattctgagaggggtttactttttggctgaggtagaagagcgtttatttcaattagcgacgcctaatttggcagctgctttgatgggggcacacgatcactttttaaaaatcattgaagaaagtctaactgttgaattgattgcgtttgatgatcatattacaattcggggtactcagccgggattaagacaagcgaacgcggttttagagagtctagttgcgttattacaacacggcgtgatcctcaaggaaacagatgtagtcagtgcgacgaaaatggcgctcaaagggacgttaaatcaatttgaggccctttatactgaaccgctcatcaatgaccgcaaaggccaaccaattcgtgttaagacgtttggacaacggcaatatatcgatgcgattcgccataatgatgtgacgtttggcattgggcctgccggaaccggtaaaacgttcttagcagtcgtcatggcgattgctgctttgaaaaaaggaacggttgaacgtattattttaacgcggccggcggttgaagccggtgaaagtctcggctttttaccaggtgatttaaaagaaaaggtcgatccttatttacggcccatctacgatgcactctatgcggtgttgggcaaagaacatacggaacgattaatggaccgtggcgttattgaaattgcgccgctggcttatatgcggggccggacgttggaagaagccttcgttattttagatgaggcccaaaatacaacgccggctcagatgaaaatgtttttaacccggttaggctttaattctaaaatgattgttaatggcgatatcagccaaattgatttacctaataaaacccagagtgggttagtacaagcggaacaaattttgcgcgacattcctaaaattagttttgtacaatttagcgcggaagatgttgttcggcacccagttgtcgcgagaattattaatgcctatgcggcaatggataagacgagaaagtaggacgaatgaatggatattcaaatcatcgatgaaacaaaaatcgtaccagaagcacaaattaaattggtggaagatgtattagagtttgctggtcaaaagcttgaattagctgaagatacagaaatgtcagtcacgtttgtgaccaacgaacgcattcgccaaattaatcaagaataccgtaatacggatcgtgcgactgatgttatcagttttgcaattgaagaggatcctgaagaagaaggcttacctgccaactttgaagaattgtttgatattcctaagaatattggggacctatttgtttcattagaaaaagccgctgaacaagcagaaacttacggccattcattcgaacgtgaattagggtatacgatggtccatggtttccttcatttgaatggctacgaccacatccacaccgaagatgaagttaaaatgattcctttacaggagactatcttagatgaattcggactcaaacgctaaaaagacgcagacggataaaaatcgtaattttaatcaatcgacacatcacgctttagatgggattatcaccgcttttaaggaagaagctaacctgagacgtgattttgtgattgcgatggtcgtgctagtagccggttattttgcccgattacactatctagattggctatttttgattttagcgatttttatggtgttgctggctgaattttggaataccgtgatggaacactttgtcgacttattggttgatcggcagtttcatccactagcgaagaagattaaggatatcagcgctggtagtgttttaattggcgcgtgtttagctgtgattatcggttgtgtcgtttttggacacgcggtgctttattatttttaaaagagattaattaagatttaaaaaaggggactattatgtcagatacttatcgctcaggctttgtggccattgttggccgaccaaacgttgggaaatcaacatttatgaatcgaatgatcggtgaaaaaatcgccatcatgtcatcaaaggcacaaacaactcggaacaagattcaagggatttatacagatgacaacgcacaaatcgtgtttgttgatacacctgggattcataaaccacataacgaattagacgaatacatggatcaagcagcactttcaacatttaatgaagtcgatgcgattttattcatgattagtggcgttgataagaagggccctggggatcaatacatcatggaccaacttaagaatgttaaaaagcctgtttatttggttgttaacaaaattgatgccattcacccagacgatttattaccaatgatcgaacaatatcgtcatgaattagacttcaaggctgtttatccaatttcagcattagaaggcaataacgtgcccgaaatgttaaaagaacttgaattaacattgccagaaggcccacaatactatcctgaagatcaattaacagatcacccagaatatttcgttgttggtgaattaatccgcgaaaaaattctagaattaacccacgaagaagtcccacattcagtagccgttgtggtcgaacgaatgaaagaccgcgtcaatggtaaacttcaaattgaagccaacatcattgttgaacgtgatggtcaaaaacggattattatcggtcaaaaaggctcaattatcaaagaaatcgggattcgttcacgtcgcgaaatcgaagctcttttaggcgaaaaggttaacttgaagctttgggtcaagattcaaaagaactggcgtgataataaccaatatctccgtgaatttggttacaataaaaagagattgtaggctttaaagatggcggaacatcgatttgaagactttaacggtctagtgatgtatcgaaagaattataaagaaaaagatatgttggttaagattttaaccgatcgttttggtaaaaagatgttttacttgcgtggggccaataagcctaaatttcgtctaagtgcggctattttgccgtttacgcaggccgaatatggcggcgatattcgcgatgatggcttatcatttttgaataatgtgaagtcagccacgcaatttcaaacgatcagtcaggatttatttttaaatgcttatgcgacttatatcctgaacttaattgatgtcggctttccggacagtgaaccattaggcatctggtatgataaggttgaacaggcgttaaatctgattgatgaaggttttgatgcggcgatgattacccatattattgaaattcaattactacaggtgtttggcgtccaaccgcaattacaaggatgtgccgtttgtggccgaaccgatttagcgtttgattactctgagagttatggggggcttttgtgccaacgtcattggcatttagatcccaatcgtttccacagtagtcagcgggcaatctattatctccgattgttttccgtgattgatctgtttaagattcaatcggtgaacgtgaaggaagccactcaggtcgaactcaaaatgattattgaccgactctatcaagatactgtgggcctgtcattgaagagtaagcaattcatcgacaagatgtacagtttcgatagtcaattaccacaattaaaaaaagtgccgtcagaaattgacagcacaccaaaagacgactaaaatagtaatcaacttaatagacgttgaagaaaagggtcccttgaaacggtcagacagtgattctaggtgagtgagaactagaacaagttttaagtggattggcatttcggagtcataccaatgaagcagcagctcgctttgagctgaagtagggtggaaccgcgagaaatcgtccctatgtgactaactgtcgcataggctttttttatgcgcaaataacggaaaagaggaattgaaatggttaaaaagttgaatgttcaagaaatgattttaaccttacagcgtttttggtctgaaaaaggctgtatgttgatgcaatcttatgatacagaaaaaggggccggcacaatgagcccttatacgttcttacgggcgattggaccagaaccttggaacaccgcttacgtggaaccttcacggcgtccagcagatggccgttatggtgaaaaccctaaccgtttattccaacatcaccaattccaagtgattatgaaaccagcacctttaaatattcaagaattttatttggatagtttacgggccttaggaatcgatcctttagaacatgatatccgttttgttgaagataactgggaaaacccatcaatgggctgtgccggtgttggttgggaagtttggttagacggaatggaagtcacacaattcacatacttccaacaagttggtggtttgcaatgtgaccctgtcacgagcgaaatcacatacggtgttgaacgtctcgcttcttacattcaagatgttgataatgtttttgatcttgaatggggtaacggcgttttatatggcgatattttcaaagaaccagaatatgaacactcaaaatacgcctttgaagatagtaatcaagaaatgcttttgaaattctttgatgaatacgaaacagaggccaaacgtttaatcgatttaggtcttgttcacccagcttacgattacgtcttgaaatgtagccatacctttaacttattggatgcacacggtgctgtttccgttacagaacgggccggctacttgtcacgcattcgtcggatggcacattcaatcgcgcaagcattcgtcgctgaacgtgaaaaacgcggattcccactattaaaacatgcacaagaagcaaaaacggaggtcgtagatcatgactaaaccattcttattagaaattggcttggaagaaatgccagcccacgttgtgatgccaagtatccaacaattagaaaaacgggtgcgtgacttcttagaagaacaacatcttgaatttggtcaattaaaaacttatgctacaccacggcgccttgcaatcttgattgaagacttagctgacaaacaagctgacattcacgaagaagcaaagggccctgctaaaaagattgccctcgatgctgaaggtaactggagtaaagcagcccaaggtttcgttcggggtcaaggcttaacaacagatgacattacttttaaagaattaaaaggcgttgaatacgtctatgttgaaaaatcaattatcggcaaacccgttgaagccattttaccggagttaaaagccgtcattatggcgatgaccttcccaacacggatgcactgggctgattacgatttcgaatatattcgcccaattcactggattattgcgctattagatgatgaagttatcgactttagtattctaaacgtcacaactggccgcacaacgcaagggcaccgtttcttaggccaagaagtgactttggctaaagcaactgactatgaagcagcccttgaagcccaattcgtgattgctgatgaagctaaacgccaaaacttaattcaaacgcaaattgaaaaaatggcgcaagaaaacgactggcaagttgatttagatgctaacttattagaagaagtgacgaacttagttgaatggccaaccgctttttacggtcaatttgatgctaaataccttgaaattccagaagaagtgctcatcacttcaatgaaggacaaccaacgttacttctatgcacggagccaagctggtgatttattaccagtctttatcggcgttcgtaatgggaacgacgctttcatggaaaacgtgatcgcagggaacgaaaaagtccttacagcgcgtttagaagatgctgatttcttctaccatgaagatcaaaaagtaaccatcgctgaaaacgtcgctaagttacaaaacgtttctttccacgataaaattgggagtcttgctgaaaagatgacccgtgttggtttaatcgctcaattcttaggtcaaaaattcggtttatctgaagctgaattagttgatttacaacgtgctagcgacatctataaattcgatttagtaaccggcatggtcggcgaatttgctgaattacaaggtgtgatgggtgaaaaatacgcgctattacaaggcgaaacacctgctgttgcgactgctgttcgtgaacattacatgccaatcagtgcagaaggcgccttacctgcaacgaaagtcggtgctgttttagcaattgctgataagttcgatagtatggctgatttcttcgctgttgggatgattccaagtggttcaaacgatccatacgcattgcgtcgtcaagcttacgggattgtccggatcttagaaaaccaagactggcacttcccaatggctgatttccaagcagctatgagccacattgttaagcaacaagccgatttcgatctagattggtcagccaatgcagctgccatcagcgatttcttaacggatcgtgttcgtcaacgctttaacgggatgcgtcctaaggttcgtcgagacatcgtcgacgctgtcttgaaaaaccaagggcaagacccagttgtgatgtttgaagccgctaaagtgctctcagcacatcaagatgatgctgatttcaaggcaacaattgaagctatcacgcgtgtcttacgtttagctgaaaaagttgactttgaaacaactgatttaacggttgatccagcgttatttgaaaacgatgctgaaaaagcactttatacagcagtcgaagacttacgtggcgcaacagcgacaaatacgttagctgaaaattatgccgcgttacaaacactacgtccattaattgaagcttacttcgatgccacaatggtaatggctgaagatgaagccgttcgtcgtaatcgtttgacacaactcatgattatcgctcaaatcgcgcttagcttaggcgatttaaacgaattgattgttaaataagcaattcaaaaggggataataaacatgttacaaatgaaacgggtttatgaagcagccgccgattctgacggttatcggatcttggttgatcgaatttggccacgggggatttcaaaagaacgcgccgaaattgagacgtgggctaaagaaattacacccaccactgacttacggaagtggtttggtcatgaaccagctaagtttcccgtttttaaagaaaagtatcttgctgaaattgctaccaacccggattggccagaattctgtcacttagtgcagcatcaattagcgcttggtgatgtgacgctcgtctacgcggctaaagatccgcaatataaccatgttgtgattttaatggcacttttaaaaaagacgcttgacaagtaataaaaatgtttgttatatttatttgcaactacacctaaatggtgctatgatatatagtgtatttttgtgctgataatcctaagagtcgcatttcattgtgaggtgcggcttttacagtcttagtacaaattgaagtgaattgtgaggtgagaccaatggcgggtaagattccgaacgaagtcatcgatgagattcggagccagactaatattgttgatgttgttggtcaatacgttcaactcaagaaagccggcaagaacttatttggtgtttgtccttttcatgatgagaagacaccatcattttctgtgagtgaagagaaacagattttccattgtttttcttgcggtcgcggggggaacgtcttcaagttcttgatggaattggaacaaattagttttccagaagcactgacgaaggtcgcagattttgctggagtgacattggcggatagttataagccaactgctgttcatcgcgaatcaagcgaagttacgcagtttaagcaactctatcaacaagccaacgaactgtttaagcatattttaactagtacggtggctgggcaaccagcgcttgattatttacacgaacgacagatgaccgatgcgttaattgagacctttagtattggttatttaccggatcaatcggatctattgttgacgtttttccaaaataaggatattccgtatcaggtattgcgccaatccggattatttattgaaacacaaacgggtaagttacacgatcgtttttctgggcgggtaatgtttccgattcgaaatgcgcaaggtgaggtcatcgccttttccgggcgggttttaaccaaacagccggatcaaccaaaatatttaaatagccctgaaaccgtgatttttaataagcggaaagtactgtttaactatgatttggctaaacaaattattcatcaatccaaaaaagtttatctttttgaaggctttatggatgtgattgcggcctattcggcggatgtcgtcaacggtgtcgcgtcaatggggacgagtttgaccaccgagcagttgaatctactagcgcaacaagcgcaggaattagtggtgtgttatgatggggatcaacccgggattgaagcgatgaaacgggcgattaacctattgcaacagcatacgacacttgaattgagcgtcgtggtcttaccaggcggcgtcgatccggatgagtacgtccgtcaatatggtagtccgcaatttaaggaaaccttgcaaaatgggacggaaacgcccattgcgtttgaactacgttacttgaaacaaggtttaaacctcgataacgagaaggatcagcttgattacgtacaacaagcattagaagttgtggcgcgtgttgagtcgcctttagcaatcgaagtttacttgaaacaggtcgaagccgatagcgggattacactggatacattgaagcggcagttacaaacggtgcgggttaaacatgccacgcaagtccccatcaatcaagtgggacaaccggaagcaccgccatactttgatgattttcaggcaccaccgctaccaccagaagaaatggccggggcttttggcgatccacggacgattgcacccaagcggcagcctaaacggttaacgcggattgagcatgctgagcaagaaattttgcacatgctgattcataacgaagatgtgcgtttacaactcgaaaataatgcagactttagctttgtgcataccccataccaactcttatatgagttatggcggtccttcatcgcagaagggcaatcggctgatatagcgggtttcacgagttatattccagatgacttgcaagaactagtcgttcagattgatctgcttgatttacctgaagaggctaatcaagaagcgttgaacgattgtttggcggttatcgggcaaaattcgattcaggaacgtttaaaagaagcaaaaatcgccttaaaagaggcaactaaattgggcaatcatagtgaggagctacggttaactaatgaagtgatacaacttgtttcgcaaatgaaatgagatattaactaggaggtttctgaatggctgacaataaaaaagctgatacgaagaaattagacactgcggttaaggccttaattaaggaatacaaacccaaaaaagaaatcaccaatgatgaattagtggcaaaaatcgttaaaccatttgcacttgaagcagatgaaatcaacgaattaatgcaacaagtggaagatcacgggattgggatcgttgatgaagacgggaatccaagtgctgccacattaaaaaaagaaaaagtttctgctaaagaattaaaagatatgtctgcaccaactgggatcaaaatcaatgatcctgttcggatgtatcttaaggaaatcggccgtgtttctcttttaaatgcgcaacaagaagttgacttggccttgagaatcgaacaaggtgatcaagaagctaaacaacgtcttgccgaagctaacttacgtttggtggtctcaatcgctaaacggtacgtcggccgtggcatgcaattcttggatttaatccaagaagggaacatgggcttaatgaaggctgttgaaaaatttgatcatcgtaaagggttcaagttctcaacttacgccacatggtggattcgtcaagcgattacgcgtgcgattgccgatcaagctcggacaattcggattccagttcacatggttgaaacgattaacaagttaatccggattcaacgtcaattactccaagatttagggcgcgaaccaacgcctgaagaaattggggctgaaatggatatgaacacggataaagttcgtgaaatcttgaagattgctcaagaaccagtttcccttgaaaccccaatcggtgaagaggacgactcacacttaggcgattttatcgaagatcaagatgcaactagtcctgaagaacatgcttcttatgaattgttgaaagaacaattagaaagtgtcctagacaccttaacagatcgtgaagaaaacgtcttacgtttacgtttcggtcttgacgatggtcggacacggacattagaagaagtgggtaaggtcttcggtgttacgcgtgaacggattcgtcaaatcgaagccaaagcattgcggaaactacgccacccatcacgttcaaaacaattaaaagatttcttagaataaattcaaaaaaacggtcatctaaaaagatgaccgtttttaatttggacaatacttcaaataataaatcttatgtcaactagatgtatctttcaacattaaagacactgatagagcgtttgctaaagattgaaaatgccccataacccaaagccaatcatcatgagtgccattaagcctcctgagtacagggcaatcggcatgaagtacgaaacgttgcgattggcctctgtttttaaatacttgaaagtatttagagttgcgtaaacctgatagagaccgagcattaaaaggacaacacttaagaagagagacataggacaacctccaaattattatttaaagcgctttctttcatttaactagagtatagaacggctgggatgattatgcaacctttaacgacaatcaatattcataatgagacgattgtctgatgcgagcttagtctgctttgacgctcaaaatttggtatactaactgtaacaatcaaagtttctagaatggagttttatttttgtcaccaattaatttatcgaaacgtttagctgcagttgcgcagttcgtcccacaagatagcatcgttgctgatatcggctcagatcatgcttatttaccaatctggctcacagagcaaaaacgattaaagggggccattgcgggtgaagtggttgctggaccttttgaatcaacccaaacacatgtgatccaatggcacttagaggaccaaattcaagtccggttaggtgatggtgtcgaagtgcttaaccccgaagaagaccaagtcacctgtattgtgattgcggggatgggtggtctattgattactgaaatattggaacgtggcttagcgcatctaaacgggcacgaacggttagtcctacaacctaatattatggaacccaccgtccgggaatggttaatgaatcaccactacgccattgtagaagaagcaatcgttgctgaagacggtcatatttacgaagtcatcgttggtgaaccaagaactgaggctgttgaactcgacgaagctgacttagtattcggcccagttttacgacgccgtcaaccggcagatttccaattgaaatggtcaactttattaaataagaaacgccatttattggtgcaacttcaaggtgctcaggtcacgccaactgaaaaaattgctacagtgcaacatgaaattcaattaattgaggaggttcaaacatgggacaattaatcgcgagtgacttgattgcggcgattgaagagtatgcgccattagtgcttaaagagggtaatgatccaactggttttcaaattggtcgccgtgataaggtggttaagaaggtactcgtcacattagatgttcggccggaagtggtccaagaagcgattgataacgagattgattttatttttgcccaccacccagtgatgttccgacctgcacgcaatcttgatctaagtgatccgcaaaataagatgtacgctgatatactgacgcatgatatgacggtctatgcagcccataccaaccttgataaagcgcaaggtgggatgaatgattggttggcagcagcgttagcacttaaaaatgtgcaaccgttcaacgtgactgattatgaagcgctaatgaaattggccgttttcgtacctgaaacacatgcggatgtggtacgccaagcgttagggcaagctggtgccggtgaattaggaaactatcaaaactgcagttttagcgctgaaggcaccggtcgttttgaaccgcaatctgcagctgatccgtttattggccaagctggtcaggcagaagtggttgctgaagttaagatcgaggttattttaccagcagctaaaaagaaccgcgtgttaaaagcgatgcttgcggtgcatccttacgaagaaccagcgtatgatttaatcccattggctaatcaacaacaacctatcggaatcgggcgtattggtcaagttgaccaaccaatgacagtccgagactacgcccaatttgtttgcgaaacgtttgatttaaccggtctccgcttgatttcaaatgaacctgataaattagttgaaacagttgcagtagttggcggtgatggtggtaagttcttccccgctgctctgcaagctaaggctgatttgtatattactggtgacgtttattatcatacgggccatgacatgttagcagccggattatccgttatcgatcctggtcatcatattgaaagcattgtaaagactaagatgactgcgttatttgaagaatggcgtcaaataaacgattgggaagttacttttattaaatctcagcaaaaaactgatccgtttacatttatttttaatgcgaagtaggttagaatagaattagtattaaataatatctaggaggcttcaccatggctaaatatgaaaaattaattccgcgttttctagaatatatcacaacagaaactcgttcagacgaaaatgcgacgacgattccatcaacacaaacacaagtggttttcttacacaaattgatggatgacttgaaagaaatcggcttaagcgacgttaagtataacgaaaaaaacggctatgttacagcgttattaccaagtaatatcgataaaaaagtgccaacaatgggctttttatctcacgttgatacagcagatttcaatgccaagggtgttaatccccaaacaattgaaaattatgatggtgaatcaattatcaaattagacgaagctggtcaatttgttttagatcctaaagaattccctaacatgaaaaactacaagggccaaacattaattacaacagacggctcaacattattaggttcagatgataaatctggggttgctgaaattatcacagcgatggattacttcatccaacatcctgaaatcaaacatggcgacatcaagattggtttaggaccagatgaagaaatcggtacaggtgctgatcacttcgatgctgaagattttgcaacagacttcgcttatacaatggatggcggcccaattggtcaacttgaatatgaaacatttaatgcagctgcaatgaaagttgatattcaaggtaaaaacgtgcatcctagtgaagctaaagacatcatgatcaacgctttacaagttgctgttgatttccaagatgctttcccacgcgatgaagtgcctgaaaaaacagatggccgtcaaggtttctatcacttattgagcttagacggtactgttgatgaagcacacatggcatatatcatccgtgattttgatcgcgatggtttagaaacacgtaaggcatttgctgctaaagtggctgaagacatgaatgctaaatacggtgaaggtcgcgttaaagcaaccattaaagatcaatattacaacatggcagaagtcttaaaagatcatatggatgttgttgatttggctaagggcgctatggaagcaatcgatatcaaaccattaatcgaacccgttcgtggtgggacagatggttctaagatttcattcatgggaattccaacaccaaatatctttgccggtgctgaaaatatgcatggtcgctacgaattcgtttcagttcaaacgatggaaaaagcggttgatacaatgattaagatgaacgaattaaacgttgaaagaaactaaagatataaaaaagagtccaacaattcaatttgttgggctctttttatgcttaatttaagcttgattagttgtcagtaaaccttttagttgctcaattggtagttggccgggcgcgctaggtgtttcgagatagccaaaactgatagctgagccaaattgaccgccaaagattcgcgaggcgacaccaaattcagacattgccattgtcgttaacggtttatcggattgatgcgtaaaactttgagtggctgctaacaagcgggttgtatctgctggtgattgggccgtcgtcgctaatttcaagaggtccgcatcaggatcggcttgcatggctaataattgcgtgcgcaaggtatcattatccggtgtttgaacggtatcatgatgactcaaaagcacttggtaatgctgttgatgggctaattcagccaattgatgacgttgctcggctgctaatgaccactctaaatcgattgcttgaccaatatgggctttgatcaagggagcgtagtaggtgaggtagtcttgagctgatgctaagccaccatcgttagtggttctaaccgttaaaattaagggcaaatcaagcgcggctattttttcagcagcggtcaatagttgtgcagaagcttgccaataatcaaggcgccattcgagaatatcgatggcgtcttttttttgattgatgaggattagttcgcgcagacagtcgtccaaatggcgtggcattagggaaacggccgtttgggtttgaccggtagtaaactcgaggtgcatttcaaaaactcactttcttaaagagattgatcgatatggttgacgagatattgtccgtcaacctgtttgaattcccagatttcgctgaaacgttcgatataagttgcttcacggcgtttttcattatcttcatctgataagcgatcattagtgaaataatcgcgcatttgggccgttacaaggactttacggacgtttggattgtccgataggatcagttcctctgagatgatggtgagactttccagctgattgtgtttatgttggcgttgataacgatttaaaatacgttgttgttgccgttggaaatgaggggttatgagcggtgcgaccaaactaagatcattggtggtccaagcggcttcaatttggtaaaagcattcttcaaaacgttcgcgggttgcatcgtcaatcgtgacggttcgtgatagtgcccgttcgtaacgccgcgccagccagtcgcgtttcttgcggatgatcattaggaaggctgatatgataaaaaagattgcaaaaacgaggttgttgagaaaactacggggcccgtagtaaccccggcgaccgtaataattgttcgttgttctgtcggtggtcgtacttgtgctgccaccaaacgaaccactagaggttgaaccaccgccaccacctgaagctccaccggctcttgcataggtagcagttggcgctagacagatgagacttaataataaaatgaaactgatgattaattttttcatattcgacctcgctattaaataacattagtcactattttagaggaattaatgggcttaggcaatttaaagattagtaaagtttaatcttaacattaaaaaaagagccgggattttatcccaactcctttttgtgattgtttaaacttttaacgatgagcaatatcgatttctgcgagccaagttagcgcaagcgggagccactgggcaaccggttcattaacgtcttgtggtttaccgggacgctgggttactttattggccaatgccaaaccgtgaacaccatcgctgaataagtgatactcagttgtgatgtttagccgatttaattcagtgacgtacagtaatgaattgatggctggtacgagttcatcagttgccgtttgccatacgaaacacggtttggcccattttgttaatgtgtcctgtgcgtgccagagacgttgatcggttgtaatccgctctttttcactttcttctttaggaaaaccagcgtctaaatcaatgacaggatagcttaaaataactgcggcatggtggccacgataactgtcgagttgatattgtgtgttcagttcagggttagtagcgataccgttaaaagtagccactagatgcccaccagctgagaaaccaacgagtacgattcgttcgggatcaactttttgagtatctgattgatctgtaatccactcgatcgttttagcgagctgttggagcgctgtaggataaaccatttggtctggttcgatgagttgataaggtaagacaactgcgtgacagccttcagctaatgcctttaaggcaattggttctgtttcacgctgtgaatggtagcggaaaccacctcctgggcagataatcacgaccggttgatggcgagtgttgttaaaatcttgattggaatctagccagtaggctgtaacttgaaagtcctggtgattcgttgtgagcgtttgattcataatttgcatagatagacagcctttccgtctgaataagcgaagcgctttcagttgatgcttttattttactttaaataaataacacctgtcaatacaatcggggaaatatatttcaggctatgaacaatacgagtgcttttaaaaacgactttaaaaagccgattatttaaagtatgatagttgctagaggaaaaatgcaatgatatcaggttatacagcactttatggcttgattgcgcatccagcgcaacatagcttatcaccctttattcacaatactggttttcaccaaattcaaatggatgcgcgctatgccgtcttcgatagtcaggcaacaccggcagcaatcgccagcgcaattaagacgctaggtattcggggcgttaatctatcgatgccttataagcaatcgctggttccgctagtagataacttaacgtcaacggctaaattagtgggggccatcaatactattaaaaacgaagctggtcgtttaacagcaaccaatacggatggtgatggtttttggtgtgccttgcaaaaggcacatccccagcgccgatatcgttctgtcacgattctaggggctggtggggcggcactagcggtaattgaggcagccgtgcggtatggtgtacagcaggtgaccgtttttaaacgtgctaatgcgacttatgattcagtcattcaacgattggctcaaattagcctagccagtggcctacagatcatcgttgaaccgtacgatgaccagttagcattggcaactgccttgcaaaatgctgattgtttaattaatgcaactaatattggcatgaccgcaacaccgggtaatcccttaccaattaacttactgcaatatttgcccgaagatagcctcgtcgcagatctaatttacgcaccgcgagaaacagcttttttaaaaacggcccaaaaagcgcattaccaaatacaaaatggcctgggcatgctgattgaacaagcggccttgagttttgaattctggaccaacgaatcaatggcgacaatgccaatttaccaacatctaactggaggcaacgatgcatcatgattattcaatttaaagcagcaacgagcaaatcactcatccaagatttttgtgaacgacaacgccaagctggtgtcgtggtttaccaatcagcacaacacgtcgcattaattggacttaaggaagtgacattaactgctgcagaacaaacaggcgtcgattcaatgacaactgatgaaccaagttatgttttaagtagtcgattattccaacctgaaaatacaatcattcaattaccacacagtacaattggtggcgagcagtttacgatgatggccgggccatgttcggtagaatcagctgagcatattttagcgatggctaaagtggccaaggaaggtggcgcaactttactgcggggtggcgcctataagccacggacttcaccttactcattccaaggaatgggtgaagcagggctcaaagcactccgccaagcagccgatgcaacgggcatggatgtcattacggaagtcatggatgaaacgcatgtggccctaattgcacaatacacagatgtctttcaaattggggctcggaatatgcaaaacttttcattgttaaaggccgttgggcagacgaacattccagttgctttaaaacgcggtctagccgctacagttgatgatctattaaacgctgctgaatatatcgcagccaatggtaatcaccaaatcatgctcttagaacgcggaattcggacttttgataatcaatatacccgcaatacgtttgatttaaacgcggttcctgtccttcaaaaattatcacactacccagtggtcgttgatccaagtcatgcgacgggggaatgggacttggtgacaccgatggctagagccggcgtagcaactggtgccagcgggatgatggtggagattcatgaccatcctgaagccgccttttccgatgggccacaagcgttgaaacccgcgacttatttagaaatgtgtcgtcagatctgggcgattgatcaattgatgcggtcgtggtaaaaatgccaactatttcggttaatttaacgacgcagaaatatcaaattaaaattgaaaatggcttagcgacttcaatcggacgtgaggttcaacgggtgtggtctgtacgtaaaattgcattggtcacagatacgattgtcggccctttgtatcaagcacaaattactgagcaattgacgcaggcgggttttcaagtgaccgtcctaaccatcccagccggcgaatccgctaaatctctcgaacaagcgatgagtctctatgaggcattgttaacggccaactttaatcgcagtgatggcctgattgctctcggtggcggcgttgttggggatttaacggggtttgttgcctcaacctatatgcggggcttaccgtttattcaaattcccacttccttattagcgcaggtggatagtagtgttggcggcaaaaccgctgttgatttaccagcggggaaaaatttagtcgggactttttatcaacctgagctagtcttaattgatccgcaaatgcttgagacactaccgcaacggcaattagtcactgggtatgctgaagtggtcaagatagcggccttagtcggtgccgatttttggaacctcgttcaacaaatcgaatcgccgactgcaattttggataaagccccagagctgatcgcgcgcagcattgcctataaggcgcagattgtgatggcggatgttcaagaaagtgggcaacggcgattgttgaatttcggtcatacaattggtcatgctgttgagtctttggcagatggtgagctaacgcatggcgaagcagttagtatcgggttaattgcgattagtcgccttttcgaacaaccgactcaaattgcggcacaactgcaaacagttcttgaacgggttggcttaccggtcacgcatccgttattacaatcacccgcattatttgagaaaattgcacatgacaagaaaaatcaaggtgctctgattaacattgtttatttaaaagcgatcgggcagccaactattttgcaactaccattaacacaatttagtgcccaattaaaaatgaaacagcgctcgttttagaaaatactggtaacctgcaagcagatactttacaattagactagattgaaactgatttacaggggttgattcactagatgcagttaattttaattgggtttatgggttctggtaaaacaaccattgcgcgtaaagtcgcacatcatttcaagagcgaatggattgatttggacaaatacatcatgcgggaacagcagatgacgattaacgaaatttttgccattaaaggccaatctgcgtttcggcagatggaatttgaagcacttgcaaaattggttcaagaagatgtcgtcattgcgaccggtggtggtgtggttgatgacgcacagacgcgctatctactggaacaaagtggcatccccatcttttacttaaatgggagttatgaggcgcattggcgccgcgtttcgcgtaatgatcgccgaccactggtcaatcaacttggtcatgatggtttacgggagttatatcacgaacgacgccctaaatattatcgtttggcagactacacgattttctttcaacataaaacaccgaatatgatgttgacggaaattgaaggacaactgccacgtattcaaaaaaaactggctaagcgacatgcttagtcagtttttttaatattaaaaaagcatatcattggctttttgagaccggttacttgtatgatagagttagaaagaggagggatgcccatgacttttaaattaccagcattaccgtatgagtatgttgctttagaaccctatatcgactccgaaacaatgcatcttcatcatgataagcatcataagacttatgtgacgaagttaaacgcagccttggcaaaacaccccgacttagctagcaaatcattacacgacttgctaacacacattgatgatcttcctgagtcattacagacaccgattcgcaataacgcaggggggcacgctaatcacagctttttctggcgaattttgactgaaaatgccccactgatgccaacaggtgaattattagaaaaaattgaagcacgttttggcacctttaaagattttcaagctgaattcaataatgccgcactaggcgtttttggttctggttgggcatggttagttgttgaccacgacggtgaattgcaaatcatgaccacccctaaccaagattcaccaatcatgagtgggaatcgcccattgatcggtcttgatgtttgggaacatgcttattacttgaaataccagaataatcgaattgactatatcgaaaacttctggaaaataattaattggccgcttgtggcggagttaatctaagcagcggccaatagatgacaacaaccggagtggtttcgtgcgtttccgctgggctgttgtcattttttgtagataatcaaaaaagcattcgctgaaactagcgaatgctttttattttagagattactatccgttgtaaagttcaatggtgagaggtttgcactgtccgtaatgagcttaacagtgaggcgttccatttcatgttgtgcaagttgggccgctttagcggaacctttggttatcaacatcgtccgttggtgcgcatcggtttcagctgcaacaagcttgtcagtagcaacgatattttgaaccatcaaactgttgatgtgtttttgggtttgttctaagtctttagcgaacttagcgtagtgggcatcgactagaataccagccaatttgtaggtccaatagattgaatcctttgagtaatcttttgtacctttttggtagttgactgggacatcatcagcaccggcgtaaaatggcacgtagacgctttgggcagtcacacccatcgctaaccagtgaagaccgctgacatcaacagggcggttagggcgcatttgaagaatatgtgactcttgtgttttcgctaaactaattgggcggaaagcatgtttttgttgtggtgtgccgtgaccaattggatcgtaggcggtcccttcatagtgcgagcctaaaatctgagcgacatcttcgacttgaataggtgcatcaggttggcgtaagaagggcaagttaaagtcttgtggttgttgttcaacagacggtgttaaaagcttttgaccgtaccaaacacgtggtgtgttgtaaacgaggtcgctttgatcttgtgtcccaaagatgttgcggaaattaaacggtgtgccagcttgccagaggtggttatcacgggtaaagttttgaagcccctcagaagtcatgaaggcctctggttgatcaaaatcaacttcttgaatggccagttggttggccacgacagcgtaactgtcatcaggaattcgttgcgcgacccagtgatgaccactaccaatttctaagtaccaaacttcatcaacgtctgaaaaaaggataccgttactttcggttgtgccatattcactgacaatcgcacctaaacgagcaaccccttcgcgggcagttttcacgtatggtaaaacaacagtgatcattgcttcttcagcaatgccgttatcgatgtagggatcgaagccgagtacgcgactattgctataagcactttcagtcccactcatagctacgccatattcattgataccatcttcttcgaataagccgtattcatcggtccattcgggggttgcggtatatttagcggcttctagtggtagatcaagcgtaaagccggtgtcttttgaaacaaagtggggtgcttttgttaattgttggtggggatgaatcaccatgtgcttaggccaagcagcttggctatcttcgttccgtgcgattaaggtcgagccatctgcgctcgcttttttaccgaccagaacactggtacaggcggttaattgacgataaaggggttcactcataataatgcctccaaataaattcgatattaatgctcattatacaatcttttaggggaaaacacagcaattaccgttgcccaattgcgctaaaacaggcataataatagtattcgaaaaaaggaggctattattatgccattagtacacatcgatcttattgctggtcgtagtcaagcacaattaaaacaactttgtgctgacgtgacagaagcaatctcaaaaaatacaggggcacctgcagaacacgtgcacgttgtcttaaatgaaatgcaaccagaccgttactcagtaggcggcgttttaaagagcgacgaaaaatagagtgcgcaataagccggggtatcttctgaggattagcctaatcaggcggattaccgacaaagtcggtgatttgactgatgtagctaaccggaagaagttggcttatggagcacgtttaatccatctaaaaagcgattcgacaacttagtcgaatcgctttttcgttaatccattttaaaatattggcgtaaataattagcgacaccatcttgtgcgttggtcagtggtgtaatgtcatctgcaattgctttgacgggtgcaatcgcattttgcatcgcgaccccagtaccggcataggccaacatgtctaagtcattactttcatcaccaaaggcgataatgtcggcttggtcaatttggtaatgatttgctaaacgtttaagaccagttgccttttgaataccgtggtggacgatttctaagacgcttgctgggccaccccacgtattaacggaaacttgggggaattggcgtaaaatttcggcccgtaaagcagcttggtcctcacgttcgacaaagactgttacagctgctggatcttgttggagtgatttacgcgttagaatttcatctgatttgagtgttgcggggaaaaacgaaaaagtattgctgtaagcttgatcagctaaaaacattgttttcccttcagcggcaatcatctgaattttaaaacgttcttttaattggaagagactaaaaacgacatccttattaatggtgtattgatattcgtcggaccaattttgcccaggaatatgcatgagggcgccgttaaaattgaccatcggtgacgtgagccctaattgatggtagaaaggttcactcaagcgattaggccgaccagtcacaatactgacaatgtggccagctgattgtagttgggtgagtgtttcttgtgttttaagtgaaattttggcttctggatttaaagtggtaccatccaggtctaaggcgattaatttttgtggcatcatagggcctcctttaaaaggtacttaagctactattttagggataaacaatgtaattgtcaatgaacctgtattgtatctaaagcggttaaacagtataataaaactattgaaatagcgtaggaggcagtcaaatggcagatgaacaaatggatacgcaacaagatgattcagcaatcgaagatttaaaggaacggattttagccgcgttagaaaccgtgattgatcctgaattaggtgtcgatatcgttaatttaggacttgtttacggccttaacctagatgaaaccggcttatgtacaatcgatatgacgttgacgacaatgggctgtcctttaacggatgtcttaacggattcaattcatcaagcacttgcaaaagtcccagaggttaaagatgtgaacgttaatcttgtttggtatccagcctgggacaccagtaagatgtcacggtatgcacgaattgccttagggattcgttaatcctattcgtatgaaccgcctcctttcacctgagtgaggaggctttttatgttatttagtctaagaaatgagtggaataatgacccaagaaacctatttggcacagttaaagcaaagtgccgtttttttcgaaaagataccgcagctaacagcacagtttcaagcgatcgaagcaagtttagcacgcctacagcaaaaacagttaccacaacacaatcttccagtactcgggattgacgaatcactctatctaacgttattattggcagcagagcagggtcaattcaaggcggtctcttcacagcaattacaagcgcaaattaaaaagacggatcatttactccgcaattatcggcaatatttgcaaaatcaattcggcatgtgggcttatattagtcaggatttgacggatagtatcgtccaacagtttcccgattggcgctttttggaaatcatggctggtaatggctacctgagtgccggtttaagggcggcaggtgccgaatcggtcatttgtacggatagcttgtcctggacgagcgaaaaccagacagggcggcaattattgacgcaggtggcacctctcgatgcacaggcggcgctcaaacaatatggtgatcaagtggatgccgtattgatgtcgtggtcgcccaacggtgtgccgattgatttagccgttttaaaccaattacggcaattagaaaacggacccgtccttttatgcttgggtgagcgctacggtgccacaaatagtactgaattctgggatgccgctcatttccataatgatcaacgcttatcgcggcttaatcgctatttacgcccgtttgatttaatgcgtgatcggttttattggattcaataacgtatcaaggaggaattagcgtttgcgtttaaaaaaattagtgcttgatgtgctatttgtcggggtagtcgtcttaggactacttgtcattagtcagcgagccaaatcgatgtacagtgaacgacttaatcataatagtttatcgcaaaaggcggttatctttaagacgaagagtcaccaatcgattcaatcaacgatccaagcgattgatcagacaaaactcaataattttcaagtgcaattcaatgttaataatcatttatcgtatgtttatgccaagggtaaacaagctaatgtgccgcttaaagacggccgcttcttctcaaattatgatttcaaatcacgaattccagtagtggtcgtcggccaatcacgggtcaacgaactctatcaaccagctagtcaagcgtattatcaaactaagaatcgttacttgtcagtaattggggttgtgggtaccaatcagaccacttcgctcgaccaacacgtctttatttcggcttcaccagagttcgtcttgaacaaccgctcgctaaaccaggtaaccgtgttagtcgatgatcaacaaatcggggcgcatcttaaagaatatcaaaagatctttaagaccaaatcaatctccaatttaacgcctaagaacacgccgattattggggtcaactggttgcgagaaaatggaacggcagcgatcatcctggtcttgttaatcatagttgctggggtgcttagtcatttatttgcgcaattggtcaatggctatcacgctcaaaagaatttgaccgctagcctttaccgtaaatatagcatgggacaaacgcagatttttgcagcacatctcttaagcatgacactgatcggttttattatcggtagttggttcttctacttaacacacttgggtattattttcggtgggttagtggtagttgatctggttttaattgcttatttctactttagaatgacgcgtattaaatcagcgcactaaaaaagcaagttagttgctagacaactgacttgctttttttgtatttaaagtgataaatgtcgttcgtttaaataatgtcgtaaattagggcttaagatcatgggtgctgattgaagtgctgttaggtttcttgcgcccaacatcgccatgattgactggatttgagcttgccaagccaataattgttcagcagtttcagtagaacccgttttgatcagcatgtgtaaaatctgacctgaaatcccaacggcagaagcgccaagacgtaatgctttgacgatatcaagcgggttacgaatcccaccagacgccaaaattgttaattcattttggaagggttgtgattcgaagagtgattcaaccgttgattgcccccaatcactgaggtagtcgtaggctttatctcggcggcgttcattttcaattgtgacgaagttggtgccacctttaccggaaacatcaatattggtaacgccgacactttgcaatttagcaattgtttcggcgctcatcccaaaaccaacttccttaacaatcacagggacgtctaagttggcgacgatttcgccaatctgatcgagccagtagaattcacgatcaccttctggcatcacgacttcttgcgctgtattgacgtggatttcaagggcattggcttgggtcatcgctaccgctttttgcgcaaccgataggtcattaccagcaccgatattagcgaggatgaagccagccgggttaaattcgcgaatcacactaaacgtatcaacgagtgtcggatctttaatcgccacggactgtgaaccggtggccattggtaagccagcaatctgtgccacttgtgccaattgcgcatttagctttttagtttgttggctcccaccagtcatcccgttaatgtagaaggggctttgccaagtggttccagcaaattgcgtactaatatcgacatcggcaatcgctagttcgggtaaactttgatggataaaacgaaggccgtcaaaatcgttttgacgatcatcttgatgaaatttttctgctaaaaagacatgttcatctttacgatgcgattggatagattgttttggtctcaccatgttagtcaactcctaatctacaaggtgaacggcaaggtttaaccgttcgatttgattatcacgccatttttcaaagagtgacgttgtatcgattgcacgatcaataatcacaatcccgcaatcaccgccaccagcaccagatgttttagcagcaccaccagctttttcagcgagggtacccattttttggagtacaggggtttcgattgcgacgtgactaaaatcagctaattcttgtaataatgcgcgattgtggcgcaattcagcttggatttgttgtaaattattagttcggaatccttcaaccatgtcttctaggcaggctttgctagcctttaagaagttttgatagtcagcttggcgttctgtttttgccagtgcgattttatcgaccaaatgagacgttgaagcgggggaacccgtccaaccaatcaagagtgataattcagcaggtggtgtcaataactcgattgataatgacggccaaggaatcgccaataattcgttcaacgtcatcgttggtctagtctctgccaaccattgcttgtcaaaagagcgataggcaatccaaccaccataaacgctggctgcaatatcccctaaagaaccgttaccttgcacatcaagatgggcaatcgcagcgagtttatagagttggtcgttagttagttcgagttcataaaaagcacagagcgctttgactgtcgctacagtgacagctgccgaactaccaagaccatatttcttaccatcggccgagtctaagtcactgttaacccgtagatgatagatacttaatttcttacccgcttggcgggcatattgttccgttaatttaatggcggataaaatataatgaaaaggattgtcacggttatcaaaaaccatttcatcaccttgtcgttgccaatataaagaattttcttggtattgctttgaaacaatactgccgtattcttgactctcttcaattgaaactgttacaaattgattcaaagccacaataatagccggaaaaccagtttctactactgcgtattcgccagcaatatacagcttcccgggtgctttagccgttatcaaaccatcagaacctttcacatttaacttattcattatgctcacagataggtcacgcccggtcctggttttgcaaccaataattgctcagctgtaaagtagggcgcaagagctgccaagatctgtggcgtttcgcgactcgtacaaatcactttcacgtttggacctgcatccatagtataatagcaagaaaccccttgttgacgcaagcgctcaacgacttctattgcttggagggtttcaggttcgaaataagtgaaaggtgggatggcactaagcgtcgttgcgtgcatttgcatcgcactcttttcagcgagttgtcccactaaatttatatctttcttaacgattgcatccttcatcttaggtaagtccgcttgagctgtttcgacccaactaggataatatggtgaagttgccacaacgcttgccataccggctcgactggcaacccgtttttgacgatcatttaaaacaatcgcaatcatttgaatatcccaatcaatttcttcttggacgggaatcgcgtatgaatcttgatcattcgtgcctcgttgccattcgacaaacccaccataaattgagcgcgtcgcagagcctgaacctcgacgtgcaagtctggataagtcccgtcggtctaaatctaaaccggccgcacgactgccggctgctgctaaagcagcatagccagaagctgaagaagctaatccggccgcatttggcacgtgattagtggtttcaacactagcaaaagttgactgacctgcttgttggcgaattaggtctaaaaactgactcattttagtttgggtttgttcgtcgggttcttggccattaaaaataatctgatcacgcgtcaatgtttctgaaaacgtgacagtcgtatctgtataaaaatgatctaacgtcaatgataaactgctattttgcggaataatcaagttggcgtctttttttccccaatatttaatgagcgcaatattagtgtgcgctctcgctgtggctgattgtcccatagtgataactcccaattgttgtttaattagtgtgtagtgcgtgtaatggttgaatccaagtcttaatcgcgccggcttggcgtaattgttgtgcaagctgttttgcatctgcttgtgttttagccagtgcaataatgcaaccgccacgaccaccaccggtcaatttagtccccaagctaccagcttgattggcggtttcaattaaagcatcgatgcgtgaattgctgacccctaaagcccgtaaatcatcttgcgctaagctaagattgtgacccagtgctgttaactgattttgcgcgatattggttgcgacggcttgactcaattcaccaatgtgggtaatgagtggttgcgtacgctcaggattggacatcatttgattttgaacgctcttaacggcggggccggtttgacccttttgaccactatcagcaatcaccaagtaaccttgaaggtcgatgggtagcggttgtagtggttggcctttaacgaaccaaaggggggtcgttgctcccgttgtggccgcatctatgccgcttggattaccgtgaatcatattttctgaaagagctgctagtttaagtaaatcgcgttggtttaattcttgatgataaaaagtaaaaagggcgcgaataatcgcaatggcggtggccgcagaagagcccattccccgttcagctggtaattcactttcaattgtcagttcaaaagcggtttgctggtcgtctaattgttgccagagctgttcgattaatcgacgaataccttgcatctgaccaatcgcttgacttaaagggccactgtaataagggctgttaatcaagggttcgctcagtgttggttgtgccgtgacatgaaccgttgtctggactgcaaaaataggaagcgcaatcgcgggttgcccgtacacgacagcatgctctccaatcaaaataatcttagcgtgactgtttcccacactcgtttgcatcgtatcacccttaatcatcaatttctgaacttaatcatactgttactactatactgcaatttaaaagtgactgccacaaacagtccgcaaatagtgaaaactatttaaaacactagtagctagtgatgattgacctcgaagctatcattttaccagaacgatacttgaaatagccatcttaattgtgaactttaaagttttttataggttgctgtcataataagtcacagcataaaaccaggtgattttatggtaaaattagcccaaaggagtggtaataatgagcttaaaatttattctaggaaccgcaagttatgatcaccaccaagcactcgtcactaacctgaaggctacttttcaagaaaagccacaagaacgctttttttatttagtaccaaaccacattaaattcgaatcagaagtctcgattttagaagcactcaagtcagatgaaaatgattacgtcgcagcttctcaaattcaagttttttcattgacgcgattagcttggtattttatgaaaaacacgccgtattaccaaattccacgtatctcgacggctggcttaaatatgttagtttttcggctactgcaagaacatcaagaccaactgcaattattccggggtgaagtcagacataccggctttgtggcccaattaacgaaacaattacttgaacttaagattggttgtatcaccccagaagatttaaccgtgatggcggaaaagctcggtggccaacaagttgaacttgctaaaaaattacatgatctaaccattattgcgaccgcttttgaagcagccatgcagaaacggtttattgaaaataccgcgctaattgatgccttgaccatctttttgcagcaacaatcactaacagattgtcatttttatgttgaaggctttgcacaatttacagcacaagaacaggcattattaaccaccttgatgcaacaagcagaagtgcaaattgcgcttatcttagatcgggcttaccctaatcagcaacctgatggtctaaatttcttctttcaagctgggcggacctactataatttatatcaacaagcacgcctgaatgctgtaccagtcatggtggatcaaatggcggccaagcagcgattaacgccagctttagcagcgcttgatcaattttggattaattctgaaagctccggtaatcgaaaactaagccccgtgccggttactgagcatttgcacgttgtggctgctgaaaatcgctatgcagagttgcgctatgtggctcgtgaaatccggcgcttagtccaaactggccgttatcgctaccaggatttcttaattttgacgcgtcacttagcaccatatcaaacgatgatagccccgattttaacggaatatgagattccgtacttctgtgatttaccacaaacaatggcagcccatcccttagtatcactattggagaaattattggatgttaatctgcatttttaccggtacgaagacgtcatggccttattaaaaaccgaattgttaattcctaaagggatgtcgatcatcgattttagggctgatttagatctctgtgaaaatttaattctaaaaaatggctatgaaggtaaagattggttaagtgatttagattggcaattttatcgtttcggttcttaccaagaaggcacgcgcacgactcaagatgaagccttaacggaacgcattaatggtattcggcgctatgtacagacaattttgcccccgttttatcgtgcactgaaagcagccaaaacggggcgccaagtggcccaagtactctatcaatttttgattgaccaaggcgttgatcgccaactattaaattggcgggaccaagcattggctgccaatcatgtggctcaagccggtcaaccggagcagacgtggtcgacctttatacaaatgcttgatgactatgtcaccttgttaggagacgtttcgtttgaagaagaagataccgaccggttaaatgaatttaagcaacttctttcggccggttttgcggcagctcaatatgcacagattccctcaacgcttgaccaagtggttctctcagaatccggaatggtccagaccaagcaacgtcagatcacctttatgattggggcgactgatcaagttatgcctgatcaaattgagaatacggcattactaaccgatcaggatcgtcagcgcttattggataatgaagggcaagccacgccgttattaaacgaatctagtgtcggtaaaatgaacgctgaaccttacttgaactacctcgcttttttaagtagtcaaaccgcggtttattttacgtatccattaggcaatggtgagggaacaactttcaaaatgtcaccttatgttgaacgcattagaaattattttaatttgaccgttcaaaaggtcacggctgaaccagcattacaaaccacagaaattccccgaggatcatggcgtagcttgttaagtgatctcattcaagtcagtcgacaagcgcaagaaaatcaagcattgattacgaaacagtggttaacgacctatcgactcttgcaacaagcaccgcaaagtcagttcttaacaacgcaattattccaaagtctcaattatcgtaatgagccagagcgcttgacaccggaaattgtcactggtttatacggcaatgaaatccacacatcgatttcaaaactagaagagttctatcaaaatcagtacgcttatttcttgaaatacggtttgaaattacaagaacggcctgtttttgaattaacaccggctaataccgggaacttttaccacgaagtgatggatcgctttattaagctgattcaaggccaacaaattgccctgccagaattggatgatcagcaaattgataaacttgtcagtgaagtcttggctaaaacctatgagcaacccgagtttaagattctcaataaaacagcgcggatgggctatattcgtcagcaattaacacaaacagttaaacgcgtcagcctagcgcttcgtaatcagagtctttcaactaacttacggccgttagcgaccgaagttttatttggccaagtcggtgcagaaaaagggctccaagggttaaacttcatgttagacgatcatcgtgaagtaaaggtccgaggaaagattgaccggattgatcaattgactattaataaccaaccttacttagggattgttgattataaatctagtcagcatagttttaatttccgggatgcttattacgggttggccctgcagatgttgacctatctcgaaacagttttgcaagatcaacaggctattttgccggccaatagtgcggtgaaacctgccggtgccttttacttacatctgaagaatccgacattgaccctcaaacaattaactaagaaaaaaatgggtcaactccaaaaaggcgagttcgatcaaatgttattagatcaatttagatacaacgggctcatcgtcaacgatgaggaattactcgaaaatctcgatacaacgcttgtcaacggccaatcgccactctttgccttcagtaagttaaagagcggtaaatttagttctaaacaactggtgacgctagatcaactcgatttattgatggcgcacaacgaagaattaatcaaagaagcgggccgggcgatttttgctggggaaacagcattaaatccgattatgcgtccagatcgaacgaatgccttaaccttgtcgccttttaagtcgattttccaatttgatgcgatgttaccggaaaataattatcgccaactagaagcactagacgaaaaagcagttcttgaacgcttaatgagtaaaaaaggagatggcaatcttgagtaacccgcaatttacaccttcacagcaagcggctgtcaatcatgacggccacgatattttagtatccgcatcagctggttcagggaagacatccgtcctggttgcccgggtcatccagaaaatcttaaaaggcaccgatgtcgacaccttgcttgttgtgacttttacggaagccgctgctactgaaatgcgccaacggattcaagccgcactacgcgatgccagtgagaaagcgaccgagccagctgttaaacaacgtttacggcaacaactgagtctcgtgccaaccgcacaaatcagtacgctgcatgctttttgtttaaaagtcattaaacaattttattacgtgattgaccgtgatcccgtattccgcttattgagtgatactgcagaacgactcctcttagcggatcaagtatggcaacgggtgagagaagcattctacagccacgagtatgttgaaaagggcacccaagacaccttattttacgaattggcccaaaatttctcgaatgatcgtaacgatgacggcctaaccgacattgtttttgagttgctcgattttgcaaatgccaatccaaacccggttaaatggttaaacgaactacccaaaagctatgctgttgatgagactggtttgactgccagtcgctatttccaagaaaaaatattaccgatattacagcaaacactcaccgaatgcttagaagctttacaagaagctgaacagctcagtcaaactagcgaaaatctgatggtttatgcgcctcaaattaccactacgcaagcagccttaacacaaatcaaagcagatgccaaaacgttaaattggcaagcatggcgccaacaactaacggatgcccagctaggacctgctaaacgcactaagaaattagagcctgatgaacaaattaataaagaccgtctgaaagccgatttagatgatgtcaaaaagaaaatccaaacgttattagacacttattttgtgtttgatgaagcaaccaccactaatattcagcgccaagctggccagttggtccaaaaattggtgcgcgtcacgttaactttcagagaagcctttcaagccgaaaaagaacgacgccatttattggactttagtgatttagaacaactctgtctgacaattttatcggcagaagattcaccagcaagagccttttaccaacaaaaatttagcgaagtgctagttgatgaataccaagataccaatccgctccaagaaacgattatccaaaaggtcacttctgatcatccacgcaatctcttcatggtcggggatgttaagcagtcaatttatgctttccgattggccgatccaagcttatttaagaataagtataacgaatttggtgtcacggaagctgaacgtgatagtgaacgaatcatcttagctgaaaacttccgttcgcgccgcaatatcgatgactttaccaatctgatttttaaacaattaatggacgaaaatcttggtgaattagactatgacgaaaatgccgccttacaatatggtgctcgttattatcctgaccagcacccaaccgcgccaaccgaactcttgctttatgaaactaagccggaagaggcagttgccaacccgcaattagataagagtgagggccaagtcgtggcggtcgctaaacggattcaagccatgatgactaatggggaacagatttgggataagaaactcgaaaaaatgcggccgattgaatatcgggacatcgttttactagccccaacccgcggtaataatttgtttatcctggattactttaaacgcttcggcttgccggttgtgattaaggatgcgcaaaattatttccaaacgactgaagtccaaattatgttagccctacttcaggtgattgataatcctaaccaagatattccactggtcagtgttttacgctcaccaattgtcgggttaaacgaaaatgaattggcattaattcggattaacgataagacggatgattattatcaagcggtctttaactttattgaccaatataatgagcagaaagtcggccacttaggccaacaagtgatgcagaagctgacgcacttcatggctttattgacgtcgtttagaacaatcgctcgtcaacaaccgattgtggacttaatttggacgatctaccaagaaactggctttttagattatgtcggggggatgccagctggacgtcaacgtcaagctaatttacacgcgctttatgaacgtgccacggcgtatgaagaaaatggttttaaaggactcttccagttcattcagtttatcgaacgtcttcaaaaacaagataaggatttagcacaaccaacgagcttagaaaatcaagacgccatctctgttatgaccattcacgggagtaagggacttgaatttccagtcgtctttttaatcgatactagtcgccgctttaaccaacaggatttacaacgctcatatgttttggataatcatggtggtttaggggtcgtttatttagatagccaaaagcggttgaaggtaccaacactgccagaattagcgattaccgcccagaaacgaaaaaaattacgagcagaagaaatgcgaaaactatacgttgctttgacacgtgcggaacaatggttaatcatcgttggccattgtgataaccaggcccaattgatgaagcaatggcaaaaagggcaaaatagtacccaccaaatattagatgatggtgttcgcaacgatgccgcaagtttactggactggataggtcttagcttaattcgccatccacaagctaaagattggatcactgattatgagccactactggctttaagtggtgatcaaaccgagtttaagttgattatgactaatgaagccttacttggtgaaataccaggtagcctgcataacgatcaggactgggggcaacaacagcaaaaggcacttcaaacaattgatttaaacagtgggatagcaacagcgattgctgagcaattaacctttaagtatcccgctaatgttgcgacccaaacgacggcttatcaatctgtttcggaagtcaaacgcctttttgaagaccctgataataccggattgggacaattagacctagcggctgaacaaccgcgccaagcaaatcgctacgtaacggatagcttagcgcaaccacagttcttacaaaccgttcaacaaccaacggcagcagaagtggggaccgcaacgcatttggtcttgcaagaaattgatttaacgcaaccagtaacgctagcgagtttgcaaggtcttgtcgatcgacttgttttacagaatagtttaagcgccaatgttgcggctaagattaatcttaatcacctattaaccttctttgaaagtgacttgggacagcaattattagcccatccagaagcggttaagcgggaagtgccattttcgttgttattaccagcagaaacgatttttgaaggcattcgtcccacagatgacgaccacgtcctaatccatgggattatggatggttatttattgactgacgacggttgttatttatttgattacaaaaccgactttattgaccccagtgatcaagaagcggcgattgaacgggttaaaaaccgctatgctggccagattaacctctatagcgctgctttaaatcagattgtccaaaagccagtgacccataaatatctttatttattgtcaattggcgaactggttgagattaactagactggtttatcagcgccattcatagtatgattaacattaattatgagtaaagtattggtgacagcatgaaccgagagactatttatgccgttgttgatttggagacaacgggaacgaacattaaagatggggaccgcatcattcaatttggttgtgcccttgttcaaaacggcaaaattattcagaccatttcacaagatgtgaatccactacgcgacgtaccaactaaaattcaacatttgacgcatattacggctgatcagttagagttagccccaatctttgaagatttggcgcccacattagttgaaattttatctggcactgtttttgtggcccataatattaattttgatttacctttcttaaatggcgaattaacgcgcgtcggcttacaaccattagatttagcaggaatcgatacggttgaattggcccaaatcatcttgcccgaggcgcctagctatcgactacaggatttaacccaactattagagattgaacacgataatccccatcaagccgacagtgacgcgcttgtaacggctaaacttttcttgaagttaagcgcccgcttacaggctttgccatcggtcacccttaaccgcctgagcgaacttggtgaaggattattacggcaaaccggtgatttctttaccgatactgcccaacagatgcgcgaaaaatcgcagccactccccaacgaattgttaattcaagaggagattgcactccgtaaacccgcaccggttgattttgaaatctaccctggttcgagctatgcggctcagtatccagtgactgaagctgaaaaaaagcgtcttttaaaaccacatttgaaatggcgtaaggcacaggcgacgatgatggatttaatccacgataatttcgagttggaaaagccggaaccattgttaattgaagcagcaactgggttaggaaagacgattggctacttactcccgtatagttatcggatgtcacgtgatcataaattagtggttgcgacctcaacgacgctattacaagaacaaatcctaactcaggccaagccactgctagagcgcttggttggtcggcaaatcaatgcggcggttgtcaaaagtgcgagtcactatattgatttgcatcgctttgaattatcattgcggttaccgcataaaaatcgaatgattcgcttgttgcagatgaaaattttagtttggttaacgcaaacgacgactggtgatttagatgagctcaatttaaccagttacaaaaccccattttttgtcagcattcaacatagaggtctggctagtttgaacccccaagcaccgttttatcatgaagacttcctaagacgattgacacaccggcagcaacaagccgaattattggtgaccaatcatgcttatttagcaagtcacgcggatgaacaacaaatttgggggccaaaaccttacttggtcttagatgaagctcaaaacatggtgtttaacgtgcagaccatttcacaagagacttggtcgttgtccagctggcaattttgggcccaaaaaggactccaatatacgacaggggcccaaaccaataatttggtgcgactatttccagcggaaacaccgcagaatcgttcattgaagttattgcataagacattgggtaagttgacacggaccttaacgcatttagaaacttatctaacggagcagtttgagccagatgaaccaacagatggacaaacttttagtgaacggtatttaaatccagacgaagtcattcaattcgttaatgctagtcagcgtgagtttggccagttaaatcgagaattgttgacgattcaagatcatttcttggcgttacgctatgtcctagaagatcagttggcacgttataccgaatctgatctagcaatttggcaatcttttgaaaatgaactcaatctcttattagcagatgttgaccattatcaacgctttgaacaactattcattgcgacgaaaccgcaggaacgccatgcgttagcgattcaaattacacggcctagtcaaccgagtcaattaccgcaatttaaattacactggcaattgttatcggctgggccccaaatgcaacaagtattaagccactttgaacctgttacattaacaggcgcgacgctagcggttaatggccatttcgactatctcaaacgtgaatttggttttactgaagagcaagccttacaaactaagaagttaagaagtccattccgctttaaacaacaagcccgtttttatatcgcagaggatggcccggttcaaaaagaactaacaccaagcgattaccatcaacaggtagcagcgcaagtgatgactttaattgccaataatccgcatcaaacgctcattttgtttaatgccaatcaaacattagaacaagtttattacgcattaggtcgtgctgggttatcactcgatcgtgaagtgttggctcaaggcattaccggcagtgccgaaaaaattactaaacggttcatgttaggacacgattcggtcttactagcaactagtagttttgtctcaggggttgattttcctgaggccgcccttgaaatggttattttggttcaattaccatttgatgcacccaatgcattacagacgcgtgtccgttatgcacaattatcagcccaagggattaatccgtttaaggctgaagcactgcctaaggcaacaatccggttgcggcagtcatttggccgcttaattcgaacgccaaatgaccgggggttattcatttgcctggatccacggttgttgacgacgcaatatggtcaacaaatgcgccgtgctttaccggcgagtctgcctcaaaaggcggcacctgtgcagacaattagagagctcagtgatttattttggttaaattctgactaagttctgggatttaaccgtagcaaaacttgttttttgctataataaagctattcaatgtagcaaggagagaatgcgccgtgcgtaaatataagagatggatatgggtatttttattagtagtcttgatgggcacgatgtttttcgtctaccaccaagcgcgctcacccgaagtcaccgcagaagcgaaggcgaccaagattgctaagaaatacgctaagctagaaaatccagatggtttttacacgtaccatcgcaatggcacgtattatacagtcagtggtcaagataaaaataaaaatggtatctatgtattaattaacgaaaagggcaatcatgtgaccgtttatcgtcaatcaaaagggatgactaaaaacgaagcccttaaaaagacgtggtccactaagaatcctcaaaaggtcctcaatattaactttggtttttataagaataaacctgtttgggaagtcgtttatcgcagcgacaagggccgcctttgttatttaacgcttgatttcaagaccggtaatacgacccaattaattgaaaatatctaggagttttgctaattagggctgttgtcgtcagtgttttgttatataataataattatcagttattttgaactgtttaagttaaattaagtcagcataaggagacagagtatatggttaaaaaaatcagtattattgacgctaaagaccatgtcgatgaagaagtcaaaatcggcgtttggttaaccgataagcgttctagcggtaagatttcattcttacaattgcgcgatggttcagcctttttccaaggggttgttgttaagagccaagtaagtgaagaagtcttccaattggctaaagacgttaaacaagaatcaagcatgtggattacaggtgtgattcatgaagatacacgttcacatttcggttacgaaattgaagtctcaaatattgaattaattggtgacagtagtgaatacccaattacacctaaggaacatgggatcgaattcttattagatcaccgtcacttatggttacgttcaaaacgcccatttgcaatcatgaagatcagaaatgaaatcattcgtgctacttatgaattcttcaaccaagaaggcttcatgaagatggacccaccaatcctaacgggtagtgcacctgaaggcacaactgaattattccacatcgaatacttcgacaacgatgcttatttgacacaaagtggtcaattatacgcagaagctggtgcaatggcctttggtaaagtctttaccttcggacctgttttccgtgctgaaaaatcaaaaacacgtcgtcatttgactgaattctggatgattgaaccagaaatggccttcatggaacaagatgaaagtcttgaagtccaagaaaaatacgtggcttaccttgttcaaaacgttatcgatcactgtgcctatgaattaaaattattagaccgtgatattgaccaattgaagaagtacacacaaacaccatatccacgtatttcatatgataaggctgttgaaatgttacaagcagctgacttcgatattaaatggggcgatgatttcggtgcaccagatgaaacttacttatctgatcaattcgaacaacctgtcttcattttaaactaccctaaagctatcaaacctttctacatgaagccacatccaacacgtgatgatgtctacttatgtgctgatttattagcaccagaaggttacggtgaaattatcggtggtagtgaacgtgaaactgacttcgataaattagaagctgaaatcaaatcaatgggcttagatattgaagaatatcaatggtacctagatttacgtcgttacggctcagtgccacattctggtttcggtttaggccttgaacgcgcaatcacatggatttgtggtatcgatcatttacgcgaagctattccattcccacgaatgattaacagaatcaaaccataaattaaattttgaaaagtatattttaaaagcatgtcgtcaattattgaccgacatgcttttttattttctcaaaacccgttacaatagaagtaatcatttttcaaaaagaaggctagtatatgaacgaattaacggcatttatagagggcggtcagcttagcgtgtcgcgcttattattacaacactaccaaacgctcagaatgtcttctgacgaactggttgtttatttacaactgagtgattttgccagccaaggggatacttttccagacttagcggtgattggtgaacggatgggattggcgccaacgcaaatttatgagttaatccatcaattacttaaaaagaaaattatcacgttgaactcaacggttaatgaacaaggccagccagttgatcattatgatctaacaccagcattgtccaagctcagtgtcctagctgtccaacaaaatcaggcagcattaaattcgcaagaaacaaatcaacgcctgtccgtttttaaccaaattgagcaaacctttgggcgcccattgtcgccacttgaatctgaaattatctcaaattggttggatttagatcattattcagctgaactaattcagctcgcagttcgcgaagcggtcttaaaccaagtttattcacttaaatatgtcgacaaaattttattaaattggcagaaacaaaatattcagactaaggaagatttacaagcgtatcaaaaggcgcatccacgacgttaatctgataagggaggtagttgaacatgttatcaaaagcaaaaaccagatgggccatgacacaactgtacgagctgattcccgatgcaaagggggccttaattgcggacagtccatttcaattattgattgcggtgatgttaagtgcgcaagcgaccgatgtatcagtcaataaagtaacaccccaactttttgaacattttccaaccccagccagttttgcggccgcagatctaaccgcaatcgaagccgacattcgttcaattgggttatatcacaataaagcgaaacatatccgcacttgttgtcagcagttaatcacggattttggtggcgaagtcccacaaacccacgcagaactcgagcaattagccggtgttggtcggaagaccgctaatgttgttttaggcgatgcgtttaatgtgccatcgtttgctgtcgatacgcatgttagtcgaattgccaagcgcttaacgattagtgctgaaaacgcctctgtacgccaaattgaaactgactttcaaaccaagctcccccaaaaagaatgggtgcaagcgcaccacacattaattttatttggacgccaagtctgcacagcacgcaaccctaagtgtgatcaatgcccattgttaagtatttgtccggcagggcaacgaatgctgcaagaacgcggttaaacactatttccaagtcttaataataaaaaaatagcctgattgtctgtgctcttattaatagagtgacaatcaggctatttttaattagtgtgatgttgtttgcgttgatattgatggttggctcgtcgattgactggttgcgggtgtacttgacgagctagcgggggcttcagaagaagaacttactgttgaagatgattcacttggtgtcgatgacacacttgaactagattcaacagagctactacttactgattcactactttcagaagagggaacactttgacttgagctttgtaccgaaatcgatggtgttggtgtttcgatgacactatgggttgatgaatatgaggagctcgttgaagcatctgaaattgcggcggtcgtacctttaacgaagagctctctaacaccggcaatcgttttagcttgaactgaactaggcattgtccaatccgtatttgaaacattttgtgaaaggtaaaccatcattgcgcggtaaatataggccgcaatgtttcgttcctccatcgttaaaccattttcgagtggcttgtcgtaacccgtccaaacagtaatggagtagtgcttcgtgtaaccggcaaaccaactatctttcgcaaggtctgaactgagtcctgatttggctaattcttcactcgaataatcggttgtcccggtcttaccagcttgatgtaaccctgagatctgtgctaacgtcccagaaccattcttgatgacgtctttcatcatatcagtcatcatataggcagttgagtctttcatcgcgtcagagccttcagaattgtaattatgtgtaacaccatctgccgtttcaactttattgatgtaggttggtttgtagtaagtcccgccattagcgaaagcgctataggcagccgattcttctaaggtagaaacgttcccaccaatcccataagcaagaccggtatcttcaggaatcgtaatccctaagcctttaacaaacttacgtgcacgcgtcataccgacatcttctaataagcgaattgcgggtacgtttcgagaattagctagcgcattacgtgctgtaattgtacccaggtagcggttatcgaaatcgtgcagttgaatgttggtacctggataaatataagctgtatcttgaagtttttgagccgttgaataattaagatattcaatcgctggtgcaaagtccatcattggtttcatagaagacccattactacgtccggaagagactgcccggttatagcccaattggacatcaccagttttgcgaccaccaatcatcgcaacaatcttaccgttgttagggttagtaatagtgacggctgtttgcattttgtcatcagggaattgaacggttgtatcgtcattaacggtgttatataacttcttttgcgcatccatgtcgatattcgtataaactttcaagccgtctttataaggatcatagccttttttcttgaggtctgtaataacttccttaacataggcatcagttgctttagcgttcgttgattcattggtttcagatttctgtgcgactaaaccagtgttaatcggaacagctttagcttcagtcgcctctgcttcagaaatcttattgttccgttgtaaggcatcgattactaaatcacgacgcgtcttggcttgatccggatgtgcataaggatcgtaattagcaggggactgtggcataccagcaatcaatgctaattgtgggagactcaattgttttaacgtcttatcataatagtacttggcagctgtttgcataccataaacaccattattcaagtaaactttattcatataatattccaaaatttgatccttagaatattgtcgttcaacttgaacggccaaccaagcttcttgtgctttacgtttgaaggtttgatcgctgttttttgttgaaaagaccgataacttgattaattgttgcgttaaagtactcccaccctgtaggcctaacgaagagtgcccagtaatgttagcaaaggccgccgatgcgattcggactggatcaatcccaaatttctccttataaaagcgccgatcttcgattgaaaccacggcatcttttaacgtttgtgggatttgatcgctgctagcataagtctgattagcagcacctaattgtttaaaagctttgttattgctgtcatagagcacacttgcattaccgttttgtaatttcgcttgtgtaatctccggggcatcttttgcataatacgcaaataagccaatacccgcgatgattagcgctaagagggctaataacccccatttgataatacggccaaatagcgatttagtacgctttttggccggtttctggtgtcttgtgacacgtgtgttacctgtttgattggcagacatgttaatttaaactcctttgtggtggcgtgcgattaattgatcgacggcctctaaatagggaatacttgggtttaattgatactgaatttcaaacccatcggcaacgatcgccgctagtggaattgacttccgaccaccagttgcttgattgtcccattgtgtaatcaataagcttgccggatacacaaataaacgttgcagtgggacgaacttcataatcacaaaacaaaccccgccttgttgtaagcaagctctaaaatgatcaatttgatgttggtgaaagttttggaacggaaatgacgttttattcttagtttccttcgcttcaaaatccacatagtgcccctgatagatgccattataatccgttgttgaagcttgcttaaagtaggcttccttaataacagcttgactacgtgctggataatcaaccttaacgatctgaataggggtgggtttcttatagataaccgcagcatcacgtagtcgataatattgattactatcgttgatctcttcttctaatgacataccgcgtttaccatataaggtggttggactagtatgtcgcccttgctttttaggctgttttgtttcatgatttgagtagggctgtccgtttggataatgaaaggccatcaagaatcacactcctgtgaaactattatagcaatattcactcaaatttaaaatcattaggtggaggactgacaattgaagcgattatggttaaccggttatcgaagctatgaactcggcgtttttggcgattccgatgagaaacttaaagttattaaatattctttaaaaaagcaacttaataattacctcgatgatggcttagaatggcttatcaccgggggtcagatgggtattgagcagtgggggattcaagttgcacaggaacttaaaatagattatcctgaattgaaggttgcgatgatgctaccgtttagcgattttggtcaacagtggaacgaacaaaatcagggtacgttgatgacgttaaaagcccaggtcgacttttgtgaacccgtcattaaagccccgtattctgggccccaacagttgcgccaatatcagcaatttatgctgacgcatacagatggtgcattattgtactatgatcgtgaagcgcctggtaaaccagaatacgatgctaaagcaattgagacctatcaagaacaacatgagtatcccaataatcaggtcgatttttttgaactacaagatttagcaaacgagttggcggagttagagaatcaagctttttagggcttttaattctttaataactttaataactttgctataatgggatttatggtatatttattataaatgaggtgtcaaaatggataatcaattagaaatcgaattaaacccaactgaaattttgaaaaaagaatttaagtcaaagatgcgcggctatgatcctgaagaagtcgacggttatttagatttagtgattaaagattaccaaacttatcaagaaaatatcgatcgtttaacggccgataatacccgcttatttaacaaggttgaagaacttaatcgtcaactaagtgcttctgacagtgttaaagaagtcaagccacaacaggcttcagcagcaactaactatgatattttgaaacgtttatcaaatcttgaacgtcacgtatttggtgctaagttaagtgaccaaaatggtgccgctcaaacaagagttcaaaatcattcacaatttgattagacaaatcgcttaagatgtactataataatatacattgattaacatttgtaaatcttgagtaatcgcggtctacatcagtaggctgaggaaggtccatgcccgcacaggctgagatgcttgtagtgttcgtgcctggcccaataagccagggtaccttaatggtaacggcggaaaaagcgctaaaacttcggtcatgcgttaatatccttaaatagtgccacagtgacggagcgtttggggaaacccaaacgatggaacgaggtaaaccccgcgagcgagtaacccaaactttggtaggggcgtctcatttatggaaatgaactaaaaatgagagttcgaaagaacagatagatgattactgaaggagctttcttcctggggaagttctggaacaaaacatggcctatagaggtttacaaacaggtggcttgggcttttgcccaagctctttttatttaaaaaataatttcctaaggggatctttaaaaaatgacttaccaactatacgctacaatggcaagtggtatcgaatccattacggctaaagaactacagaatttaggctacgaaacgcgttcagataacggtcgggtttatttcgaaggtgacttggcagatatcgccaaaactaacctttggttacgcagtgccgatcgtgtgaagattgccatcggtcaattcgaagcaaagacatttgatgacctttttgaacaagtgaaagctttgccatgggatcaatatttaccactagatgctgctttcccagtagctggtcgttctgtgcgttcaacactccatagtgaaccagatgtccaagccatcactaaaaaagcgattgttgataagttgagtaccgtttatcaccgtcggacgcgtttagctgaaactggttctgtctatccgctagaagtcagcatcttaaaagacatggtgacaattagtttagatacaactggtcctagtttgttcaaacgtggttaccgtcttgaaaaaggggaagcgccattgaaggaaaacttcgcggcctcattaattctccttagtcgttggcaaccagatatgccgtttgttgatccaacgaccggttcaggaacaattgcgattgaagcggccttaattggtcgtaatatcgcgcctggtatgcaccgtaagtttgcctttgaagactttgactggattgacgccactgttttagctgatgcgaaggctgatgctaaagcacaagaaaaaccagatcaagaacttgaaatcttcggttatgatattgaccaaaatatggttgatatcgctaagttgaatgctaatgaagcgggtgtcttacatgatatccagttcaaacaattagctgttaaagattttaaaacggatttaacgaacggggtcatcattgctaacccaccatacggtaaacgtttgagtgatcaaactcaagcgcgggtattgtataaagaaatgggcgatacttatcgttcattgaaaacttggagtaaatacattttaacaagtgatttacaattccaagaatctttcggccaacgcgcaacaaaacgtcgtaaactttataatggtcggattcagactgatttattccaatattggggtcgtccagtatggccacgtgctgaaaaagccgaaaaataagaaatttaaagtattttcccattatatcggggtaaatgcttttttatttgcccaaaatccattataattaagattacttcaatgataaggtgagggatcgacttgacagtcatattagcagcagaaccaattcctgaacaacacgtagaagatttacagcaacaagggttaaccattattaatttggataacgtacaacccgaacaattggcaaccatcgatattatgtttggttggaataaaatggtggggcctaaaattttagcaacaccaaatcatcgcttgaaatggattcaagcagctagctctggtgttgactatttaccattagcaacattgagcgaacaaggcattatcgtttcaaatgccaagggtatgcacgctgttccgattgcacaaactgtgatgagttatattttatatttcactcgcggtattcgtcaaagtttgagttctcaagctaacaaggaatggcgccatcatgagattgggcgcgcgaccgaaacacttgagcaccgaacaattatggtctttggtaccggccaaatcggtcatcagattgccgtttacgctaaagcgttggggttaaaaaccatcgggattaatcgtcacggtgaaaaacgcgatgcgtttgacgaaattttaacggatcaagattatcaaacgaaattagctgatgcggatttcgttgtgaacatgatgccgttaacaccggaaacggaaaactttttcgatacggcattctttaatgcaatgggtgaagggcactactttttcaacctaggtcgtggtgcttcaattaatgagacagcgctcatggcacaattgaataatggtcatctcgcaggggccgcaattgatgttgcgcaaactgaaccattaccagaaacatcaccactttggacgacaaccaacttagttatcaccccacatatctcgggttacattccagatattcacgaacgactctttagaatcttcgaacagaatttaccagtcttcttaacggacgggcaactcgctgttaaccaagttgatttatcggctggttactaaaaaataagacttaacactatatcagtgttaagtcttatttttgtggttaaatttctatagaccaggaattggttccgctaataaacagtcatctgttcgatcgtaataactgacaactttttgggttagatcacttcgccaataaataatgccagcagctgcagctagctcacaaaacacttcaaaagtgatttgaccagtctgcgctttttggaccgcagctttaatttgagtggcattacttttaggggcaaccttttgtggcacaccattcattttaaaatcaagataaccatcattatcgtaatagcgatattttccggattcaacaaggtaaccatatttaaggacacccatttttttaaaggcctgcattaattttggaaagtcactagcattctgttcagcgtcgaccgctttttgaattgcgttataatttaacatcactaatctcatttctattttttctttttagcgtacaacaattacgaatttcgaacaagtaaaatcgccttttttaaatccgtgatttgagacgttttaacgaccacttgtccgttagttaatctgaaatgcgcttaaaatgcgcctctcgtaattagtgtgttttaaacgtgattagaccggcctttgaaccacttctggtatttatcggtatgagcgcacgcttttggtagaaagaatgcgctcggaatccctttaaatcaacgatagtcaggggtgcaaaatacgaccgcatggtttataatgatataagtaaaaagaatgcggtcaaaaggacggaattttaatgcgaaaatcacgaactaaaaaaggcaaaaaattaaacgtacagcctttaaggaccaaagacgagattgaggacatgaaagttatcttacgacactcccaaatgggtagtcggaattatttactttttttattaggcatcaataccggtttacgttgttctgatattgtccaattaaaagtgaaagacgtgatcgaagacaatcccgtcatcgtcgaacaaaaaacaggtaagtggcgccaaattagtttaactagtttgcgaccctatattagtttatatattcaaaataatgaactgactggtaacgactggttattcgggagtcgcgtcggtgatagtcacattacagtcaatggtgtttatcgcatgttgaccgaggcgggcaagaaactcggccgcaatgatattggcacacatacaatgcgcaaaacttacgggtattggttctataaacaatttggtgatgtgcgatcattaatgattgattttggccattcaacacaggaaacgactttacattatattgggattacccaagatgaagttttaagtaagaaacaacaattggcaatcggcctttaaaaaaggcttgccttaaagtgagcttcaaggtgtatagtagagatatcaattatataagttgtaattgtgtttagaaatttcgctatataataggaagaaacacgttcaaaaaaattttgggagatgtttttatgaaagcagcaacttttattgaaccaggaaaaatggtgattactgaggcacctaaaccaacaatcgaaaagaagacagatgccgttattcggattattcgggcttgcgtctgtggctctgatttatggtggtatcgtggcctttcaaaacgtgaatcaggatcactagtcggacatgaagcaatcggtgttgttgaatccgttggtgaagcagtgactgatattaaagctggagattttgtaattgtcccatttacgcatggttgcggacactgtgctgcttgtttagctggcttcgatggtgattgtacaaaccaagaaggcggtggcaatggtggttatcaaggtgaattcctccgttataccaatgctaattggggcttggttaaaatccctggccaaccagctgattattcggacaaaatgttaaataatctcttaacactttcagacgttatggcaactgggtatcacgccgctgtttctgctgaagttaaacctggtgacacagtggtcgtcatgggagatggtgcagttggtttatgtggtgtaatcggtgctaaattattaggtgcagaacagattatcgccatgagtcgtcatgaagatcggcaaaaactagcactagaattcggtgcaactgatattgttgctgaacgtggggacgaagctgttgcaaaagtgatggcactaactgacaacgctggggctaacgccgtcttagaatgtgtcgggactgaacaatccgttgcaacagcggtagccgttgctggcgcgggtgctgttatcggtcgtgttgggattccacaaaaggcagaaatgaataccaacgtcttattccggaagaacatcggcctccgtggtgggattgcggcagtcacaacccatgataaagcacggttactcgacgctgttttaaagggtgaaatcaaccctggtaaggtcttcacgcaacgctttaacctagatgatattcaagctgcttacgaagcaatggatcaacgccaagccatcaaatcattattagtgattagcgattaatcatttgaaaggaatggttgcatgattttccggttaattagtttaatttttgtcattttattactgcttagcttctggattaaaatcccatttttcaatgattaccgaccagttatgattcttatatatggtcttacttactatttcgttgatcgacatcagcgactaacacgctaatatagctcaaaaaagccgttcggataatttatccggacggctttttatgtatttttaaatgagtttaagtaaataaccacctaagcaaccaaagataagacttaataaactaccaattaagtagtattctgcaaaatgatgttcattggcttcaatggcgcgaaaccgcgtgagggctttgattgcgacgacgaccgcgatactcgcaacattattggtatagcataataacagaatcgccaaacgttctaagagaccgatgtgccgacccagttgtgctcggtctggtagtcgttccacatttaaatctaagctttttaaaaataagctgatgaaataatcggcaaaatataatgtcgcaattatcacacttgcggctaataaccaccgactaatcgtggttgactgccaattagtccctaataattgactaacaatgacaatcacaactaaatgcaaaacctgatctaaaacgtaactgattagagggacttgattgggttttaagcgtaatgcacgtttcaaaatgggttggcaattctgcttagtgacatcgattagccaatgcgttagcacgacgattattaagctaatgccgaacgtttcaagaaaaggccagtttgcaacacgcagtagcgttccgattaaccagatgccaaccaccattggcacttgcgtcaacgcgtgccccaataatgggtaccatttaacggccaattttgttgagcgtttgcaccgggccatctgatcggattggattaaaaaatccgtccagaaatgggccaatagcaaaatcgcaaataacgtcatgcgttcacctccgccaaactcattagttgcgctcgaaccgttgttaacgtctgctcaatgagcggataatccatctgattgagcaaccgactgatcttactagaagcgacagcacgctctttttgctgcgtataatccacttgataagtcagattaccatatgcttcccataaaatttgagccagctcataacgtttcaagttcggttgcgcataaagtagagcaaacgtctcttttcgcagcttcgtgtttaatagccgttcataaattaaataaaaaagggcactaatgccattagcggtttctgcagcctgatcagtgactaattgccacttaaaaagagaggttgaaaatggataaccgaggggtaaagttgcgccttgcattaggcgttttgcctgatcaaccgcagttaaggcattaacaattgccgaaccatttacgcgattaacatcctgataatctgccttttcaactgtaactagttttcctaaaccaacgccaaaatagaattcaggaaggtctactgacccaaaaagcggttcccaaaattgtctaaaagccacactgcgcaaataggcattacagaaaataaataaatctgccaattgcgcttggtctgccgcttgaaaaccacctaataacccatcaccatcttttaccatgaaaggggtgagtaaatccgggaaacgatcattcagttttttctgcaggtgctgtaataacgttaaaacttgcgtttgatcggcaaaattcgttcgactaccaactaaatcgataaaacaataagcagcttgcataatgaacctcctttggaaaacatttgattataagtacataatagctaaatatatccttaaaatcaaatgtttaattgaaagacttgcgattttatacgttagtgttatagttaactacataagtaactaaccaatcaactaacggaagtaggtgatcctttgttttttgaatttaataacgaaactcctatctatcgacagattgccgaccaaattgaagaagggatttttacgggcgttttcccaccagagagtcagataccttcaacaaccgagatatcgcgacaatttaatattaacccggccactgttttaaaaggcatgaatcaacttgtcgaaaaaggcttaattgaaaagaaaagagggcgcggtatgtttgtcacgacaacggcacaaaaacaaattaatcaacaacgacaagatgaatttttagatcattacgttgcagcattcattacagaagcgcaacaactaaaattatcgaaggacgacttaattgcactgattgaaaggggctatcaaaatgactgaattaacaactgaacatttgattaagcaattcggtaatcgggttgtattagatgatatcaatttaactttaaagccaaatacgatctatggcttactagggcgaaacggtgctggtaagagtacattattaagcattatagcgaaccaaataactgcttcaagtggcacaattaattgggataaaacaccgttaaccgggcgtgatcatcctttacaagccatttatctcatgtcagaacaaaacatattcaataaagaaaatcggcttaaaaagattatgaaagataccgccttattacaaggggccttcaatcaaacgcttgctgataaaatgttagctgatttcgaactcaatcccaaacaaaagcttaatcaactctcaactgggtatcggacaattttcaaaacaattgtcgcattatgtgtgccagcggattacgtttttctagatgaaccaattctcgggttagatgctaatcaccgcgttttattgtatcgctatattttggaagcctacgaaaatcgaccacggacatttgtcttatcaactcatattatcgaaaagattgctaacttaatcgaacacgttttaatccttgatcaatctcgaatcattgttgatgatgatctagaaacggtcctcgatcacagttatcaaattagcggtcccaaagaagacgtcttggcatattgccaggaattaccaatcttagcgagtgaacaaatcgggacactctacactaactatctctacactgagttacccgcagaccgggtgatccccgatcgcgtagcaatcaaacatgtcgatttgcaaacaatcttcattaaattaactgaaaaggggcgtgaacagcatgtttaaagcaatgttacgatatcgattaacggccatttggaaaacgttgctaattgcgttagcgattggtgccgtcgtaacaactgccagtgaattaattttaagcaaacaagcatttagtataggattactaggcgctagtttagcaatgaccggtttaatcgtcacacaactctgtctcattgtcctttcattcacaatgacccgaccctattttgagtttgggattctaaatggcatttccagaaaaacgaattatgcaacacatctggttagtctattaggtagtcagcttgtgacctttatgcttttttatcccgcaacagccgccatttttcaatcacacattgaagacaatacgaatctatttgatccgtatctcatgtttatcatgattattggtgcttggattgtgattgctagtgggattgaaattagcagttttatcactttatttgaacgtaagatttggtggattgtgattaccttatgggtagtactagatattctttttgaacattatgttcatcccgttattaattcaatcttacccacttggaccaagctcacagcgctcaatttcaataacgctagcattatgacagctgctaaagtggttgtgatgagtccgtatttctggctaactgttttcaccagttttgttttcccattgttagttgcgtgggtctgccaatacttcatacaaaccaaaaaaatcgcgctcaagtggcgtcgttcagcttaattgaatatagtcgggtaatgatgatagtcattacccgactttttgttcccagattgttttttagtgttattttgattataatgaatacttatcagtactaaggaggctatcaatatgttatattcaccactttttgaatgcgatgtgccaacaatccgctaattccgtgcatttaacacaaattggaggatttacacatgacaatcactaaacaagcaatcttagagcaagcacaattggtaaccgcaacatttggatttactaattctaaaaaagatactgcattttggaagacgactttaaccccgttactcaaggagattgaagctgatttaacactcgaacaaattcgcgagttgcctaacattattgcgacgaaaaaagcgtataaagcagtcggtcttgatgcaacacgtcatcgaccatcttcggatagtttattacgccgcgtcgttaaaggacaggggctctatcaaattaatgcgttagttgatgtgaataattatctctctttgaagctacaactaccgattggcagttacgacttagctaaaatcgacggtccaatcagttatcaagtcgctgaagaaggggccgagtatgctggaattggtaagggcgcgattaatatcagtcactttccaacactagtcgatcaacaaggtgcgtttggcagtccaatttcggattccacacgcgccatgattgcccctgaaacgacagaagcgatgcttgttgtctatgcttttggacaatcaccagcacaattagcggcaattgaacaaaccgttaaaaccgtccttcaggcagcctttaacccagaagaaatcacaactgaaatcatcgcgtaaaagaaaaaggggctaagacaaaagtaaattttgtctcagcctcttttatttatctgaacttttatagtctaaacgtgttctgtcagccaactctttccggttaaccctaaatatcaaacgattgctacgcaatcattcgctattttgtgttaatcctcaagacctgcccggctgacgaaacactctaaccgagttacggcacactttttttattgcgctaataattctactaattctgttttaggaatgcctgtaaagtaaggtgttgtgtcaattggttcgagggctgctgctaagtgttcacggtcataaatcgttccggctaatttttctgctaaatcattagcatcacctgaaccgaagaaatcgccgtagaatttaacgttggcaatcttaccattttcgatcaataagcgggcatcaatcgtcccaaaatcaaagtgtttccgcttttgaattgttgatttaggtgacttgccataaacccagtcccagttactatagagatcattgaaaatcttgtcgatggcttgttcatctgccgccgttaattgatattcacgatcggcaatttctggtaagcttttggcattaaaaaggttcaagagtaagacatctctaaattcttcggtcgacatattttgatattcagggttcacgtggtcttttaaattagttacccgctggcgaatggacttgatgcctttagaagcaatcttatcagcagggacgttcaacgcttgtgtgaggacatctagatcgacgttccatgaaagggtcccgtgagagaacgttttgccgtttttggtatacatcgcattgccagagaatttcttaccagcgactaacatatcgttacgaccagagacttcagccgatgttgcgcccatttcgtgaagtgcatcgacgattggttgcgtaaaagatttgaaatccccaaattgttctgaatcagcatcgacaacgaaactaaaacaaaggttgccgagatcttgataaataccaccaccaccagataagcggcgggtcaccgtaatgtgattatcctcaatgtatttttgattaatttcttcatacgtattttgattccgacccacaataatacatggtttttcaatatagaaaagcaataatggttcatcaaagttcttttgattcattaaatattgttcggtggccaggttacggcgaatatcatttgacttcataacaacgtaatacatcagcataaaacccctttcattttcactactttctcattatactacagattcaaaaaaagggactaacaaaaaggaagttactaaaaaacccggataatggtcatttatccgggttttcttaatcatctacatattctaataggtcgcctggctgacagtcaagcacttggcaaagacgttctaatgtcgaaaaacgaatcgcttttgccttttccgtctttaagtttgaaaggttggcaatggtaatctcaactttttgtgaaagttcagtgacactcatctttcgttgggccagaatgacgtctaaattaacccgaattggcattttaaatcctccttagactgtgaggtcgttttccgtctgcaatgcaatagcgctcttaaataggtcttcaacgatctgcatcagaatggccaaagcaaacggaataaagatgagcgcaatcccaagtaacaacaaacccggcgcatcttctagttgcgtaatccgatagaaaaagggaagtgacaataaactagcaaaacttgcgattaagaccgcatttctaatcgatgatacataacgcaatgtttttggcgcaaacacttggtgttgttcaatcgtattgagaatgcgatgcagcgcatataaagcaacccacacacaaatcgtcacactataagcggccagggccaacgtgataatttcaaaaggatagtctaatttagctgccgtcacaatctggacggtaactaaaaagctaaaaaggaagaagactgcgccgattcctaaaagtgctaaacgtaaaagccatttttttaacatatcaaacacctcattgaatgaattaatagcttgattataacattttaatatcgataaacaattaatttttatcgtttttcgataaattaatactttgttaataatcactattagcggtgttgataatcagcgcaccactgatgaggaccattgtcgctgtattgttccaactgccagtatttaagatcgtccgaatagcggtaattgttgtgctgaccggattaatcctaacaactggctgtaaaaaatggggcagcgttttgatgggaataaaggcgttcgataagaacgttaacacgaggataataatcatcgataagctgctgatcagctctgcatttttgaccattaaccccactaaggcaaaaatccaagaagttgaccagccgataaagaccgccagtagtaatgccccgatcagtgcccccagattgacggtggggcgccaacccattatcaccgctgtaagaatcgccattccgccagaaagcactaatcgcaaaatatcacctactaattgccctgccagtggtgctattggggaaatcggtaatgttttaaaacggtcgaagataccgttattaatatcttctcgtaattgttggccagaaccagaagctgcatttaaaatactttgaactaaaataccagaaaccagcatcggcaagtaggcgtgaacgctaccggcgatgacgccgccgaatagatagccaaacaatagggtaaagataatcggttggatgagcacatcactgacgttatcgggattgtggcgcgtttttaataagttacggtgggttaaagtgagaatatcacgtatagtatgacgttttattatatttgtattcattatctgagctccttagtttttaccaaccgtcatttttaggaaaacatcatctaacgaaggtgtctcaagttttaaatgactaactgtaattttagcaatttgtaattgatttaatattacgattatcgctggaagagcgtcgccaccaagtgggctgactaatgtctgttcactaacgctgattggttgctttaaaacgtcctggacaatcgcgtgtgcttgggataattgtgctagctcagtgacggttaaagaaagttgtaagccacctaatttttgctttaattcattaggtgtaccactggcgataagttgaccgtgatcaatgagcgcgatgtgatcggcaaattggtctgcttcctctaaatattgggtggttaaaaagacagtcgatccttgggccaccaatgcttgaattgcttgccacatttgaattcttgttctaggatctaaaccggtagtcggttcatccaaaaataaaatcttcggacgacccactaaactgactgctaagtctaaacggcgtcgcatgccaccggaaaaagtggccaacgcttgattagccgattgcgttaaatcaaaagccgtcagtaactcgtctgcacgaatccggctggcttgactgctaagtccgtttaaccgtccaaataaacggagattatcacgtgcacttaagtcttgatcaatcgctgccgtttgattcgtcacgctaaattgttggcgtgcttggcgactttggcttagtgtattaaagccattcagcgtaatctgcccctcatcagggcgtaataaagtcgtcatcatttttaaaagggtcgttttgccagcgccatttgggcctaagaggccaaatatttcgcctttttttacattgaaagaaatatcttgaacgactttcttttgaccaaattttttttgaacatttctgacttcaatgacattatcctcacgcatattagcgcctcctcatatttaatcaggtcacctgattaaacaatatagtaagtcccccttaccaaaatgtcaaggattgctattttcaaattttagaatggtgtatactggatgaaagacaaaggggaagatgacacatgacaaacagcgtcaaagcagaattagttgctggtaaattagccgaatatgaacaactcagtaaaatctatgatgatatcgtcaaacaagcgcgaccccatctgattgtcgaaggtcaagggaaaatcttattggcactagctgatgaggatcacttatcccaacgagaactcgcctcacgtttaggcatgtcgccacaatctaccagtgaatttgttgcgaaacttgttaaacgtgaattggtcactttgaccaagttaccgagtgatcggcgggttaatttagtaaatctgaccgctgctggtcgccaggaaatcgaatccgctagtcgagaagtgccaccttttgtgaacgcactttctgaagcagaactagatcaactcgtaccgttactgacaaaaatcacaacagcgatgtacgctgatatcgacgcgtctaatcccacattgggcgttaaattccataagttattggctagtcggtacttaaatcaatttaaaaaataaatggcaatcaaaaaagcgagtctcactaatttcttagtgactagcttttttgatgtcttcatcaggaataatgaatagttaatgatagatgagtttttaaaatactggattggcagcacatctaaattatgataaagttggtatgcttatggtgctaacaattttaagggtttaattacgctagctagcataagtgttaattggtgtaacggaaacggttattaatgtcgttgattaatggccaaggggattatttttgggggaggattgtgacaaaatgcaacaagtgaagcgttttttttcaaaagggtctaacattatgttgagtattcttttgttaattgtttttgtgtgtttagtgattacattgaagccacgcgatagtggggtgcagtcgatcaacttagatagtgatcgattgcagtatcgtggcgcggttgaaaagggccgtttcagtggtgatggcaaactaatgttaaaaaatggcgactattataccggccaatttaaaaatggtcggtttgaaggcgctggtcaatttatttctcatgaaggttggcagtataaaggccaatttaaagcgggtgcaccttatggtcaaggtgaactgaagaaaaaccatgtgacttataagggggatctcgttaatgggaagtatcaagaaagcaagaattagatggtttagtttaattcgcatttttggcctagggatggttttatactatcactattttaaaacaagatatgccggtggctttgttggggttgatgtgttttttaccttttcaggttacttaatcacagcactatttattgatgaatttatccggcgcgataaagtgaaactatgggcattttatcggcgtcggtttaaccggatttttccgccattattattaatggttctaatcgcggtgccgctgtcttcaattgcgaatccggatttaagaacgaatttaacgaaacaaattaccgccactttaagttttacgacgaatttttatgaaattagtacgggtggtagctatgaaactaatttcattccgcacttatttgtgcatacttggtcattagcagttgaaatgcacttttatttaatttggggcttaattgtctatcttgtttcaagaactgtcaaaagtgcgaagtatttcagaacggctatcttcagtgtttcgtttgttttatttgccgttagctttctatcaatgtttacgcaaattaaaggtttatctgaatattcaccgatttatttctcaagtttaacgcatggttatccattctttgtcggtgcgatgattgggagcttttgtggggttggtcaatcagcacaaggctttaatcaattaacgagtcgcttgacctggaagacaccattaattggtttcgtggtcagtgcgttgttattatttggtttaggaacgcgtatgaagtttgatcaagctagtacgtatgcttatggcatcttactagggagtttaatcacaggatgtctcattatttttgcacgtctattgcatgataaagcacccaacgtagctgaaccacgcttcattacttatttagcggatattagctatgcaatgtatcttttccactggccattgtacattatctttttaagttactttaacaataatattaaagcagtagtggcggccttaattggctcggttattttctcaacactgtcttattattacatcgaaccgcttttgatgggcaaaccagttgcttaccaaaaggcggtcggtggtccgttgttgtttgcgatggtgattttaggtgtggtgacagccaactatgcagttgacgcaccacatatgtcttctttggaacaacatctctgggtcggtaatctttatcaggacgctgatcaaattcaggcggttcacgctaaggttagccaacccaaacaaacggtgccagttagccaaactaactataatgtgccccaaggcattagtattatcggtgacagtgtcacattaggcgcacggagttatttattagaacacgttaaaaatagtgacattaacgctgaaggcaaccgtcgaatggatcaggcgtatgacgtattgatgaaccaacaaaacaataatcaattgcgagaatatgtcgtgatctgtatcgggacgaatgcttttccagatttcaaagaacaaatcgataagattattcatgatttgaaaaaaggacatcgtctaatttttatgaccccttacgatggtcatgcagatgcgacttatgatagtaccaaaatcgcagtctatgaacggacgttaccggctaaatacccatttatcacggtgacagattggaataagattgctgctagccatccagaagtttttgaaggcactgatgggacgcatttcggtggcattgaaaaaggcaatattttatatactaagggcattaatgatgccattaagacggctggtaagaagaccgttaaagcataatttcaaaaagagcaccaattagttagtttttaatagctagctgattggtgctctttttagtatcaaagtaatagtggtacttggaaaaactgttacgtcccttaactgttggtattagcggttttttgatgaagtagacttatggttgtaacttggttgtaatatgaatgtaacattattggtctatactataacctattaataaaacacggggtaattataaaaaatgtctttcaaaaaagtaatcacaagtgtaattgtaatgagtatggtagccgtttcagcactaaacacagccgcagctaatgcagcaacagttgatgaaacacaagaagccattacaaataataaaagtgaaacagccaaattgttaaaggatattgcaacagccaatgctgataatatcaaactacaacaacaaatcactgataacacaactaaaattgaaacgactaaaacaaatattgatcaatcaacacaaaaaatcgcaaccttaaaaacacaaatcacaagcgcaaaagccgaagttcaaaaaagaacgacagtgcttaaggcccaacttgttgcattacaaaaacaaacaggggacactgtcagtggcaatgtttactttgattttgtcttaaactcaaaagacttttctgatcttgttgcaagatcattcacagtcaataagttgaaccaagcaagtaaatcagcactagaagatgttaaagcagctaaagcagaatactcaaatttaatgacagaacaagaaacaactaaatctaatttacaatctgaaaaaacaagttttgaagcacaacaaactgatttgaaggccatgaaggctaaatcagatcaacaacaagatgcattaaaccaaaaggttaatgacaataaggcaacattagaagcgctacaaacacaatatgatgaagctgcttctgctttaaaagttgctaacgatactaaggctaaagaaacaaaagtagtaaagactgctgtttctactaaagatacttcagataaagcagaagcaacaagtacttcaaacgatagcaaagcaagcacttcaagtaaaattgaaaataaaacaagcgataatagtgaatcaaagaaatctaatgacgatagtgatagccaaggcgacggtagcacacatggtaacgttgctggcaactcatacgcatggggtcaatgtacttggtatgttaagcaagttgcaccttgggctggcaataactggggtaatggcggtcaatggggtgcttctgcatcagcagctggcttccgtgtcgatcatacaccatcagccggtgcaatcattgtctttgtacctggtcaatctgtaggtggtcaatggactgctgatcctacgtacggtcacgttgggtatgttcaatcagttagtggcagcagtgtcacaattacacaaggcgggatgggttttgctaacgcagctggcccaaatactgcaacactttcagatggcggcagttacatgtatattcaccgttaatctttaaatgatgatcttaaaaatttagtgaaaaaggcttatcccttcgggggataagccttttttgttgcaactggttatttcaggatgaaagttcaggtagcgttcctttttaagataacaatattgtcacttctaatgctagcataagtattgtacattattaataacgagagaagattatcaattggggagggtaattaggtggcgaaacgaaaattaatgatgatcggcagtgttgtcatcacattaagtgtttttttagcgggtggctatgttgttaaagagcaaattgatcagaaagcagcccaacaagaaaaaatcgaaaaacaaacgcaacgacgaaaacgtcaaagtgaaaaagcggcgatggttaaatctgaaagtattcaaaaacaaaaagcgcgtgaaaaagaagcaactaagccaatgtcaacggtggttgctgataatacgttagatcaatattttaagcaagttaacttttcaggaacagcattaattgttaaagataacaaaattatgcttaataaagggtatggcacagctaatgaagcggccaaaaaattaaatacaccggacacgttatatccaattgcgtcaactgaaaaagcactgatcgcaaccggtattttacaattaaatcaacaaggtaagttgaaggttaccgatccagtggcgaaatatttaccccaatttcctaatggtcagcagattaaattgacggacttactgcatcatacttctggcattgttggacgtaatcaggacaatcaagaaaagaccagcgaccaattattagctgagattattgaaaatgggactaagggccaaccaggcagttggcactatttagatgctaactatattgttttggttaagattttagaaaaagtgagtcatcaaaactaccaagattacttacaaaataagattatcaaaccaagtaaaatgatgcatactgggtttatgtcagcgcaatacccacagttagaaaatgcctctatcgggtatgaaaccaaaggtggtgttaaaaaggctgaaatgttaccgaattttagccagctttatggcgtgggggatatgtatatgacggctatggatatgtaccgttttgataaggcgctttggactcacaagttaattaatcagcagcaaaccgatttaatgtttaaaccgggtagtgattctcattatgggatgggcatgtataatgatccggcattaatcgtcaatcgcggctatctttctggttggagtgtttcaaacggctttagtcatggcggccgaatttatattgtattattctcgaatgttaagaacgataaaacgtcgttaagtaagatgaatagtgatttatacagtaaagtagtggcaacaatataagtttaaaagacgggggagcgaagggctcaaccgtctttttttgtgacttttaacccactataatgattgtgtaaaatttaatttaggcaaaacgcttccattttggacaccggtaatctataataaaaaacaaggaaacgttttccaaagaaattttgttaaaggaggattaaaatgactgaaaaatacattcttgcgattgatgaggggacgacaagtactcgctcaatcatttttaaccacgatggtcaaaaagtcgcggatgcacaacgtgagttcccgcagtactttcctgaacccggttgggtagagcataacgctaatgaaatttggaacgccgttttatcgactattgcaaacgcttttattaaatctggcattcaaccgaaccagattgcggggattgggattactaatcaacgtgaaacgacggttatctgggacaaggcaactggcctaccaatttacaatgcggtggtttggcaatcgcggcaaaccaacgacattgctgaaaagcttaagacagatggttacgaagatttaatccataagaagacgggcttgattgttgatgcctatttctcagcaaccaagattcgttggattttagatcaagtgccaggcgcacaagaacgtgctgaaaagggcgaattgctctttgggacaattgatacttggattacttggaaattaaccggaggcgcaacgcacgtcactgattatactaatgccagtcggacgatgatttttaacattcacgacttggactgggacgacgacatcttgaagcttctcaacattccacgagcgatgttacctgatgtgcggccaaactctgaagtttatggtgaaacggcgccttatcatttttatggcagcagcgtaccaatttcagggatggccggtgatcaacaagctgccttgtttggtcaattagctttacaacccggaatggtcaagaatacttacgggacaggctcatttatcgtgatgaacactggtgaaaagccaacgatgtctgaaaataacttattaacgacaatcggttattcaatcaatggtaaagtgaactacgctttggaaggctcagtctttgtcgctggttcggccattcaatggttgagagatagcatgcaattagttgagaaatcttcagattctgaagctgctgctaaagcttcaacgagtttaaatgaagtttacgttgtgccagcttttaccggcttaggtgcaccttattgggacgctgaagcacggggctcgattcttggtatcacgcgtgggacgaaccgtcaggatattattaaagcaacactgcaatcattagcctatcaaacacgtgacgttgttcaaactatgcaaaaagatacggggattgatatcaagatgctacgtgtcgatgggggtgctgctaataacaactacctcatgcaattccaggcagatattttaaatagtgccattgaaaaagccgcaaacttagaaacaacggccatgggtgctgccttcttggccggcctagctgttggtttttggcaggatacagatgaattagcgcaaatcttctctgttgggcagcgtttcgaacctaacatgccagaagaagaacgtgaagatctatatgccggttggcaacaagccattgaagcaacaaaaattttcaaacatcgtccatataagatgaacgaataaggaggattattatgacattttcattagaaagccgtcaacaagccattcaaaacttaaagaacgaacaacttgatttattaattattggtggtgggatcactggtgcaggggtcgccattcaatctgccgcatctggtattaaaacgggtttaatcgaaatgcaagatttcgctgaaggcacgtcatcacgctcaacgaagttagtccatggtgggattcgctacttgaagactttcgacgtgggggttgttgctgatactgttagcgaacgtgcggttgttcaaggcatcgcacctcacattccacggcctacaccaatgcttttaccaatttatgatgaacctgaagcaacttatgacatgttcagtgttaaaattgcgatggatttatacgataaattggcaggggttactgggacacaatatgccaactacacaattgatcgtaaagaagtgctccaacgcgaacctggtttgaaatcagatcgtttgatgggtgctggtgtctatttggactttgtgaataacgatgcccgtttagtaatcgaaaatatcaaagaggctgacgaattgggcgcaacagttgccagccacgttaaagctgttgggatgacttatgatgctaatggccgcgttaatggcttgaaagcacatgatgaattaacagatgaaacattcgatattcatgccaaattagtgattaatacagctggcccttgggttgataaagttaacgctttgaatactgaagtgaaagcacaagaaacacttcgtccaactaaagggattcatttagttgttgatagcagtcgcttatcagtgccacaaccaacttattttgattcaggtctccatgatggtcgcatgattttcgttgtgccacgcgaaggcaagacatacttcggaacaacggatacagattacacaggcgactataaacacccacgtgttgaacaaaccgacgttgattacttattaaaggctatcaataaccgttatcctagcgttgatatcgcattaaacgatattgaagcaagctgggctggtttacgaccattaatctcaaacaacggtagttctgattataatggcggtggtgctaatagtggtaaggtttcagaagaatcattcaataacctaatcaagactgttgatgactatgaaaataaaacagctgctcgtgctgatgttgaaaaagcaatcagccaattaagaacagcccatgctgaagaaacggttaacccttcacaagtctcacgtgggagttcacttaaagtggctgaaaacggcttgatgactttatcaggtggtaagattacggattaccgtaagatggctgctggcgcattagaaatgattcgtgatatcttgaagaaagacttcaacgaaacggttcgtaaaatcgattctaagaagttacaagtatcagggggtcattttgatcctaataacgttgaagatacattgaagttctacacgaaagtagcgatgagcaagggtatttcagaagatgatgccactgacttagctaatcgctttggttcaaacgttagccgtgtagtttcatatgcagatcaaggcacagctgaaggtttgaacttgaaggaaacgattagtttgagatattcagttaacgaagaaatgacgttaacaccagttgattatttattacgtcggacaaacttcgtcttattccacaatgatcaattggcagccatcaaacaaccagttatcaacgaaatggcccgtctcttgaactgggatgctgctgaaaaagaacgtcaaacagcacaattagatgccgcaattgctgaagcacaactcgactatttaaaatagtgagttaaataaggaggaaaccttatggataattcaataatggtccaagcactaggcgaattagtcggtacatttatcttagtcctcttaggggacggggtcgtggccggtgttagtttagcaaagactaaggccaacggtgctggttggattgcaattacgttaggttgggggtttgccgtaacgctaggtgtttacgcatcagcatttatgggccctgctcatttgaacccagcggtcacgctcgcctttgcaatcatcggtaaagtatcatggtctgttgtattaccatttatcattgcccaaatgattggggctttcttgggggcagtcgttgtctggattcaatactacccacattggcaagcgacagatgaccaatcagcgattttagggacttttgcaaccggtcctgcaattagaagtccatttgccaacttaatgagtgaaattattgggacatttgtcttagtattcgcattgttagcattgacacggggccaattcacagaaggcttaaacccactcgtagttggtgttatcattactgcaatcgggttatcacttggtggaacaactgggtatgcaattaatccggctcgggatctaggcccacggattgcgcatgcagttctaccaattgccaacaagggtgattctgactggcaatacagttggattccagttatcggcccattcgttggtgggattttaggggcattattgtttgtcctgttaccataataaacgcctttaaaaagagtgactcattcattaatgagtcactcttttttgttcgtctttttaaataactaatattttacgaaagatatttattaattattttgcgcgtaacacgtacaatttataaaactataataaaataatacggatttccctttaacttatgccgtcgtcgttgttaaaatcaaaccataatcaattaagaaagcaggctaatcgaatgactgatgtagcgattgtgatgggatcgatctctgattgggaaacaatgcaggaaacggctcagattttaacggatttgaatgtgagttataccaaaaaagtcatttcggcacaccggatgccaattgaaatgattgcttttgcgcaaagtgcggcggaagaaggttatcaagtgattattgcaggtgccggtggtgcagcacatctaccggggatgttggctgctaacactgttctgccagttatcggggtaccaattcaaagcaaggcgctcaatgggatggactcattgttgtcaattgtccagatgccaagtggtgtgccggtggcaacggtagcgattggtaaggcaggcgcaattaacgctggtttgttggcaacccaaatctgcgggcttaaaacaccaacttatcaaaaggcattagtgcaatacaaacaagcacttcatcaaaaggcggtggcaagtaatgaccaacttaactaaacaaattttaccaggacaagtcattgggattattggtggcggtcaattaggacagatgatgaccttggccgctaagtcgatgggctttaaagtcatcgttcttgatccgcaagttgattgtccggccggtcaagtagccgatgaccaaattgttgcggcttacgatgacgagaatcaaatcattgaattggcgaaacgttcggatgtcgtgacttatgaatttgaaaacgttgatgcaacgacgattgaaaaagcacaacaattaacacaaattccacaaggaaccaaggcgttacggattgcacaagaccgtgttttggaaaaacaattcttagcaaccgagaaattaccgcacgccgcttttaaagtcgtaacatcgattagtgaattaactaaagcggtcgctgagattggcttaccctgtctcttgaaaacggcccggggtgggtacgacggtaaagggcaacttgtcttaagacgggccagtgatattgaagccgctagagcacttctggattttggcgtttgtgtgttagaagaaatggtgacttttgatcaagagatttcagtcatgattagccagaattggacagggcaacaggcactttttccagtcattgaaaaccaacaccggcataacatattacatattagtatttgccctgcacgggtaccggcggcggttgcacaagaagctaaggaaattgctcagaaaattgcgaccgaaatagaattggtggggacactcggggtagagttcttcgtgaccccaactggccagttgtttgtaaatgaaatcgcaccaagaccgcataattcgggtcatttaacgattgaagcttgtgacttgtcgcaattcatggcgcacattcgggggggttgcaattggccacttcaaacaccgcgcctttggcaatcagctgtaatggtcaatgtcttaggccaagatgtaccaggtgcactggccaagagtcgccaatcaactgattggtcttatcacgattacggcaaggctgagcgcaaagaaaatcggaagatggggcatatcaccttgttgactgatgatctaaacaaaacactttctgaaattgaagcaacacaaatttgggcgttaccaaaggagtagacaaaatgattgaacgttatacaaatcctgaaatgggtgccatttggaccgatcacaacaagtatgaagcatggttggcagttgaaattttagcggatgaggcgtggtctaaattaggacacattccggcagaagatgtcgctaagattaaagccaacgcacaattttcaattcctcgcattctagaaattgaataggaaacaagacatgatgtggtggcattcacccgggccgtttcggaaacactaggtgctgaacggaaatgggttcattatgggttaacgtctactgacgtcgttgacacggcttacggctatttattgaaacaagcgaacgccattttacgagctgatatcgacgctttgatagaagtgattggtaagcaagctaaacgttatcaagatacagttatgatggggcggacacatggtgtgcacgctgaaccgacgacttttggtttgaaattagcgctttggtattccgaattaaaacgccataaagaacgatttgaagcagctgctgaaggtgttgaagcaggcaaaattagcggggctgtggggacgtttgcgaatattccaccgtttgttgaaagttatgtttgtgatcaattggggattcgggctcaagaaatttcgactcaagtcctaccgagagatttacacgctgcttacgttgctgaaatggcgttattagcgacatctatcgagaaattcgcgactgaaattcgtggtttacaaaaatcagaaacgcgcgaagtggaagaatactttgctaaaggtcaaaaaggttcttcagcaatgccccataaacgcaatccaattgcttctgaaaatatcacaggcttaacgcgagttattcgcggtcatatggtaacggcttatgaagatgtggcactgtggcatgaacgcgatatttcacatagctccgctgaacggattattttaccggatacaaccattttattagattacattctcaaacggtttacaaaaattatgacgaacttgacggtcttcccagaaaatatgaaacgtaatatgggtcggacttttggtttgatttatagccaacgcgtgttattgaaattgatcgatcacggtctttcaagagaagcggcctatgatttgattcaacctaagacggcccgttcttgggatgaacaaattgatttcagaccgttattagaagccgacgaacaggtaatgagcattctaacgccagctgatttggatgatgcgtttgactatcattatcatattcggcatgtggccgaaatttttgagcgtgttggtttgggttaaaaataaacgaactttgaaatagcgatcatttcaaagcttttttatggcaaaactaaaaacgaacaattattaattattttataaaataatatgtctattggaggaagaaacgatgagtgaaacgttactttattcagggaaagccaaggacttattttcaactgacgaccccgaagtcttaaaaatgatttataaggatcaagcaactgctttaaatggtaagcggaaagaacagattactggcaaaggggaagttaattatgaaatttcaaaattaatttttgcttacttaagtcaacaagggatcgaaacccatttaatcaaaaatgtatctgaaaccgaacaactcgtcaaaaaagtcaccattatcccgttggaagtggtcttgagaaatgtggtcgccgaaagctttgcgcggaagttttgtcaaccattgggacaacgattagaacaaccgattattgaatattattacaaaaatgatgctttggacgatccggctattaatatctcgcaagcaacggctttgaaactggtgacacctaccgaagtggctacgattgaagcgatgacgaaacagattaatactttgttgattaagttattcaatgaaattggtattgatttaattgattttaaattggaatttgggcgatatcaaggacgcttaattttaacggatgaattttcaccagataattgtcggctttgggatcagaaaacacactcatcattagataaggatgttttccgccagaataagggcgacttagtcacggtctacgagacggttttacaacgcttaacaaaaacgattgggggttcaacaaatgtataacgtgcaagtttatgtcacctataaagattcagttctaggtccacaaggtcaagcggttcaaggtgcgattcaacgcttaggttttgaagggatcagtcaaatgcgaattggtaagttttttgaaatgcaagtgactggtacggatcaagccgctgtgattgagaaagttgaagcgatttgcgatcgactattggctaatccaaatatggaacaataccgctacgacgtacaattggtggaggacgcaaaatgaaattcgcagtgcttgtttttccaggatcgaattgtgatgccgatttataccacgcaattatcgatgtctgccatgaagaagcggcttatgtctcttacacagcaaccagcttagccggttttgatgcggtgctaattccaggcgggttttcatacggcgattatttacgcagtggcgcgattgctaaattggcaccaattatgacggcggtggtggcttttgctaaaccggttttaggaatctgcaacggtttccagattttgacggaagcaggcttattaccgggggcgctgttgcccaatcgccaaacgcatttcatttgcgaaacggtaactttacaggttgaaaataacgacacacgctttacaaatcaatatgcaaaaggggccacagttgcgctgccgattgcccatggtgaaggtaattattattgtgattcagaaacattggcccaattgcacgccaaccaccaaatcgcatttacttatacaaccgacgttaatggtagtttagacaatatcgcgggcatcacgaacgaagcgggaaatgttttagggatgatgccacaccctgaacgtgcagtcgaagccttattgggcagtgcggatgggctggatgtcttccaatcaattttgacaactttgaaaagcggggtagtaactcatggtgaacaatccaacggcaactgagattcaacaaaccaagttataccgacaatggggcttaaccgatagtgaatacgaattgatttacactaaaatcttaaaacgattgccaaattacacagagacgggccttttctcggtcatgtggagtgaacattgttcgtataaaaactccaaaccgattcttaaaaaatttccaacgaatggccctcacgtgctacaaggacccggtgagggggccggtattttagatattggcgatgggcaagctgttgttttcaaggctgaaagtcataatcatccctctgctgttgaaccctatgagggggcagctactggtgtcgatgggattatccgcgatatcttttcaatgggtgcaacgccgattgccattttagacagcttgcggtttggggagctcaatgataatcaaaccaagtatctggtccaggaagtggtcgctgggattggcggttatggtaattgtattgggattccaacagttggcggtgaaatcagttttgatccgtgctatcaagccaatccattggtgaatgcgatgtgtgtcggtttgattgaacaaaaggatattcaacaaggaaaagcgcgaggagccggcaatagcgtgttgtacgttggcgccaaaactggacgtgatgggattcacggggccacctttgcatcggatgaatttgctgaaggtaaagcaacgcaacgctcagccgttcaagtcggtgatccattcatggaaaaattattgatggatgcttgcttagaattaattttgcaacattcggattggttggtcgggattcaagatatgggggcagctggattggtttcatcaactgccgaaatggcggctaaagcgggaaccgggatgattttagaccttgatcaagtgccgcaacgcgaaaccgacatgtctgcttatgaaatcatgttatccgaatcgcaagaacgaatggctttatgtgttagagctggttatgaagaccaagtgattgctttatttaaaggttacgacttagatgccgttcggattggggaagtaacaaccaaagaacaataccaactatggcaccaaggccaattggttgctgatttaccagtggcggccttaacggatgccgcaccggtttatcataaggaccaagcaaaaccagaacgcttagtaacctttgccgcccaagcgccctatgtgcctagcgtgacggacactcaggcaacttggttggcactattaaaacaaccaacaatcgcggataaaagttcattctaccgtcactatgatgcccaagtgaaaaccaataccgtcgttttacctggtagtgatgcagccgtagtgcgcattcgtggcaccaaaaaggctcttgcgatgacgactgactgtaacggtcgctatctttatctagatccccacgtgggtggccaaattgcggttgctgaagctgctcgaaatattgtcgctgctggtgggcaaccattagggattacggattgtttaaactacggtaatccggaaaaaccagatgttttctgggaatttgatcagagtgctcagggaattgctgctgcttgtgatatttttggcacaccagtgatttcgggaaacgtctcactgtacaacgaatttaatggagaagcgatttaccccacaccaatgattgggatggtcggtttaattcgagatatccaagacattactacgcaagatttcaaacaagttgatgatttaatttatttgattggtgaaactgacgataactatgcaggtagtgaattacaaaagatgcaacaaggcactatttcaggtcaactgggccatttctcattagcaacggaaaaggctaatcaagatcttgttttaaaagccattcaacaaggcttgattgctagttcgcatgatctatcagaagggggcttagccgtcgcgctttctgaagcaaccttcaaacaaggtttggggtatcacgtacaagtagatctggctagtcgccaattatttgccgaaacacaatcgcggtttattgtgacggttaaagcggccgatcaagctgcttttgaacagattagcgaccaatcagcccaattgattggtcgggtaacggctgaaccaataatgcatattcaaacgaaagatgaaatgattgacttgaccgttgaagcggccaaggatgcttgggaggcggctttaccatgcttaatgaaatcagaagcttaaatgaagaatgtggtgtctttggggtttggggccatccagatgccaaccaattggcctattttggccttcatagtctccaacaccgggggcaagaaggggcgggaatcgtcacgaatgacaacggtcagttactaggttatcgcgatcgcggtctattagccgatgttttccggaacccagaaaatttagcccaattaacaggtgaagcggctatcggtcatgttcgatacgcaacggcggggagtcacggtttagaaaatattcaacccttcttgtttgattttgccgatggtcaatttgcgttagcgcataacggtaatttaaccaatgcggtcacgttacggcgtcaattggaagatgagggcgccattttaaagtctagttctgattcagaaattttaatgcatctcattcggcgagcggctggtccggatttacacactaaaattaaaacggccctcaaccaaattcacggtggttttgcctatgtgctattaacgcagggttccttgattgcgatgcttgatcctaatggcttccggccattatcgattgggcaaatggccaatgggtcgtatgttgttgccagtgaaacgtgtgcgctgaatgcggtcgaagcgacttttattcgggacgtacaacctggtgaagtcgtgacaattgatcgcgatggcttacattcggatttcttcacgaccgaaacgacccattcgatttgctcgatggaatatatctatttcgcacgaccagattctgatatttgcgggattaacgtccacgcagcgcggaagcgaatgggtaaacgattggcggcggaaacgggcgttgatgccgatatggtaatcggggtacctaattcatcgctctccgcagccagtgggtacgcggaagccagcggcctaccatatgaaatggggctcgttaaaaatcaatatgtcggtcggacctttattcaaccgacacaagcactgcgagagcagggtgttaaccgcaagttagcagttgttaaaagtgtcgtggcaggtaaacgaattgtgttagttgatgattcgattgttcatgggactactagcaaacacattgttaaacggttgaaggaagctggagcgttagaagtgcatttacgtgtcgcctcaccaccattaaaatatccttgtttctacggcattgacattcaaactcgcgaagaattaatcgcttcacaacaaagtgtggctcaaatgtgtgaaacaatcggtgctgattcgttggcctttttgagtcaagaaggtttgattgatgcgattggcttacaccaagatgcgccgtattcagggttatgtatggcgtattttaacggtgattatccaacgccgctatacgattatgaagcagattatcaagcgagtctaaaacaagataaggagtaatcgagatgacagatgcttaccaaaaagcgggcgtcgatgtgacggctggttacgaagtcgttgcccgcatccaaaaaaaagtaggggctgataatcacaatattggcagctttggcggacaatacgcgctagaaatggcccagtatcaaaaaccggtgttagtctcgagtacggatggtgtcggtacgaaattgatggttgcttttgcagctgatcaacatgcgactatcgggattgattgtgtggcgatgtgtgttaacgacattgttgcgcaaggcgcgcaaccgttatacttcttagactatttagcaactggtaaaactgatccggataagattgaagacatcatcgctggtgtgctcgaaggttgcaagcaagccaatatggctttaattggcggtgaaacggcagaaatgcctggtatgtatgcggataagcactatgacgttgccggttttgcagttgggattgctgaacaggatgcgttagtgaccggtgaaacgattcaggccggcgacgttctgattggattggcgtctagtggcattcattctaacggttattcattagtccgcaaaatcttttttgagcaaaataatttgacagttgctagtcaattgcctgaattgcctggcaaaccactgggagacttgttattaacgcctaccaagatttacgttgaagacttacagccgctactgcaacaacgggtgattaaaggcgccgcacatattacgggtggcggttttattgaaaacgtaccgcggatgttgccggctgatttagcggcccacttaacgttggccagttggccaatcctaccgatttttaaggccttacaacaatatggtcaacttgctgagatgaaaatgtataacatcttcaatatggggattgggatggtcttggcggttgcgccagaagcagcaccagctgttttagcgcaattgaatgccaaacaggaacagcttatcagattgggaccgttcaaaaacgtcaacaagcggcggttgaattggtgacagccaaatgagagtggcaatttttgcatctggcacaggcagtaacttcgaagcaattgctgataatcaacgcttacaacaagcgggtcttgaaattgtccaactggtttgcgatcgcccgcaagcagctgtgattgaaaaggcgcaccggcgggaggtgccggtgacggtgttggtaccacgtcagtttgaaaatcgtcaagcttacgagcaagcaattgttacccagttggcgcctttggcgatcgattatattatcttggcgggctacatgcaaattatcacgcccgttttactaggcacttatcctcagcggattattaatatccacccggcattgttaccggattttccggggattcatgggattgaagatgcgtaccgtgccaaagtgagtgaaactggcgtgacggtccactatatcgatgaaggagtggatacggggccgattatcgcccaagcaaccgttccggtgaaatcaaatgatacgctagcaacactagaagcgcgagttcacgcggttgaacatcaattatatccagctgtaatttatgatttaattcaaaaaaataattaaagggagcttttaacacatgaaaagagcattgattagcgtttcagacaaaacgggtattgtggcatttgcccaaggattagtagcggcagattttgaaattatttcaactggtggcacttttagcgccttggaaaaagcgggtgtgccagtgacacccattaatgaagtgacccattttcctgaaatgttagacggtcgggttaaaactctccatcccgatattcacggtggtctattggctaagcgtgatgaaccaacacatatggcagcacttgctgaacacgagattacaccgattgatctggtttgtgttaacctctatccctttaaagaaacgattcaaaaaccagagattacccaagcgcaagcgattgaacaaattgacattggtggtccatcaatgttgcgttcagctgctaaaaactttaagtcagtgtacgtcgtggtggatcaagccgactatgatgaaacattggcacaattgcaacaagatgatgtcacttaccgccgccatttagccgctaaagcattccggcacaccgctgcatacgatagtttgattgccaggtatctatcagatgccgatgcggttgaattccctgaaaaacgttccttaacatacgacttcaaacaagcgttacgttacggcgaaaacgcccatcaaaaagctgccttttaccaaagtgctttaccaagcgacttttcgattgctgctgcccatcaattacacggaaaagaattgtcttacaacaatattaaggatgcagatgcagcgattaaagtcgccgcagaattcagcgaaccatgcgtggtggcgatgaaacacatgaatccttgtggcgttggtttggggacaactatctacgatgcttggcaaaaagcttttgcagctggttccgtctcaatttttggcggtatcattgccttgaatcgcgaagtagacgttcaaacagccaatgctttgcatgaattattcttggaaattgttattgcccccagttttgcaccagaagcgttagcaattcttgaaaagaaaaagaatattcgtttgatgacacttgattttgaacaagccgctaaagcggatcgtttcaaaacagtttcggtcttaggtggtctattggttcaagaaagagatcgcttaacggatcaagcatctgaattgaagacggtcaccactaaagccccaactgaagatgaaaaagaagcgctcttatttgcgcaacgcgtggtgaaacacgtcaaaagtaacgcgattgttgttgcaactaaagatcaaacgttgggcgttggtgccggtcagatgaaccgagttggctccgttaaaaatgcgttggaacaagcattagctaatgggatgcaagcaccattcgtgttagcatcagatgcctttttcccaatggacgatagcgtagcctacgctgctgaacacggcattacagcgattattcaacctggtggatcaattaaagatcaagattcaatcgacatggcgaaccaaaaaggggtcagcatggtctttacaaatcgacgtcattttaaacattaagaggtggcaattaaatggatatcttggtgattggcagtggtgcgcgtgagcatacactggcacgtgaactactaaaaagtgaacaagttgaacaggtttattgcttacctgggaatccggggatgcaattggaccagataaaaacggccgcaattgacgtcaatgattttgagcagttaattgcgtttgctaaaaaacaggcggtggcttacaccgtcgttggcccagaacaaccattagtcgctgggattgtggatgcttttcaagccgcgggtttagcaatttttggcccgacgaagcaggctgcggcattggagggctcaaaaacttttgccaaagaaatgatggcttgagcacaggtgcccactgcccaatatcaaacggtaactaatgaatcagaggcgttaaccgccttgcaagggcgttcgttgccaatagtgattaaggccgatggtttagcggctggtaaaggggtggtcatcgctgaaacattggcggatggcttagcggccgttcggcggttcttcaaacaaggacgtcgtcagatcctcatcgaagattatttggtcggtgaggaattctcgctaatggcgctagtggccgatgatcaagttcatccgttgccgattgcccaggaccataagcgggcctttgaaggtgaccggggaccgaatactggtgggatgggcgcctattgtccagtaccgcaaattagtgatcaaatggtacaaacagcggttgaaacgattatcaaaccagttgtggcaacgatggccgctaatggcacaccgtttaccggcgttttatatgcggggttaattgcaaccgcaactgggatcaaagtaattgagttcaacgtacgctttggcgatccggaaacccaagtggtgctaccacgtttgcaaggtgatttagcgcaagtctttcagcaattattaacccatcagcaaccgactttggactggcaagcagatggtgtgacgttaggggttgtggtggccgctaaagggtatccaaatcaaacgccggcaatttttcagttggcaccaactgctcgttttaaagcggctaatagtcagtttagctttgccggtgtggtagcaacaaccgggggcttaatgagtgctggtggccgtttatatacggccgtttatacggcacccacaatggcgcaagcgcgggtccaaattgaagccggtttacaatcggtggccgatccgcaaagctttttccgccgagatattgggtttaaaagtcaaatgtaagaaaacgagtacaaatgtttgctaatcactatgtaagtcccatatcatgatcctattgacaaaaagaaagagacaattattatgacatatcctacaagtgacgcagaacacccagttgatgttttaaatctagtatcgctagaaggtcgtgtgaaggaacgaatggaagcaggtgcctttggctatattcgtggcggttcagaagatgaatggacaatggctgaaaataccagtgccttcaatcaaaagaagattatgccccgtgttttacaaggggttgaacatgctgatttgtacacaaaattgtgggatattgatttgaagatgccgattattcaagccccttcagcagcacaaggattagcccacgaaaaaggtgaagtggatactgccaaagggatggccgcagctggttcaatcttctcaattagtacgtatgctaatacacttgttgaagatgcagccgcagctgcgcctgatgcaccacaattcttccaactttatatgagtaaagacgatcaatttaatgaattcttactacaaaaggccgttaatgccggggttaaaggcattgttttgacggttgattcaacgttaggtggttatcgtgaaacggatatcgaaacaaaattccaattcccactaccaatgcctaacttagcagcttatagtaactcagatggttctggcaaaggcatttcagaaacctatgctactgctaaacaaggcattgttccagaagatattcaaaagattaaagaaatcacgcacttacccgtcattgtcaaagggattcaatcacccgttgatgctgagttgaccgtccaagctggcgctgatggcatctgggtatcaaatcatggcggtcgtcaattagacggtgggtctgcttcttttgaagtgttaccattagtggcgcaacaagttgctaaacgggtgccaatcatctttgatagtggtgttcgtcgtggtgaacacgtctttaaagcacttgctagcggggctgatttggtcgcgattggtcgcccaattatctatggattgaacttaggtggcgcacaaggtgtcacctctgtgatcgatcatatgaaccatgaattgtcaattacaatgcaattagctggtaccaagacaatcgatgccgttaaagaaacaacattgcttgattaatttggatttaagagcgctaggacttttgtctggggcacttttttggtcaggaaatcttcccctttcttttgaaaaacgatcaataattattcatatttaaccactaaactagggctatcgtgttaatagaaagcgtggtgtggattatgaataaaatgggcgtgtttatgagtttggttgtgacatttgaggtcggagtggttgttggctggcaagttttaggaactaagacagtgacgcaagaaaaattgccaacgacgaccgaaacatcgcaaagtagccaaaccaataacatacaacctgatcaaaatagtgatgaaggcccaacggaaaatcagccgcaaacaagtgaaagtcaatcaacggcggatgcaacaacggtttaatccagtggtcattaatgatatactaaaagtccttggcaggggcacaaatagcacaaaaagaggcggacttcaggacaaatgtaaatttgcctgaaagtccgccttttgttgtttaaaattaatgccggttgacagtcggtaagtccgctaagaatagttcgcttgcgactaagccgattaaacttaaaataaagtaaatccagtgggcgccgctcccccaaccaaagaggctagcgtcgataccgactaagatgatgaaaataaggcaattaagtactagtccgattcgaaatgttaattggctagcaactacagcgaataatacgattgaaagaaaaatagtaaagaatgcagaaatcaaaataacgaccacctaacactgtccgatttaagatacttgtttcattctactataagaaatagccgacgacaattaaatttaggtgcgagttggtgaatctaaaagggtccgattaaaaaaagcgtactttaaaagcaaatactagacagttattaaaaaaacaggctatactagacgcgaagtagccaaagaatgggggaaccaaaatggttcgtgaaattaatcctgaaacgaccgatccacgtgttcagcggacaaagcaacaattacgccgagcactggttgaactattaaaaacagcgaccactaaagaaatttcaattcaagcaattaccaagcaagcgcagattacgcgaggcactttttacctgcattatgaagataaaactgattttattcaaaaagcagttcaggatttaactcaagatttataccaaacaattacgattcaaaatgataaactagcgcaaccctatcaacaaatcaatctattagcattatttgaatatgttgagcggcgccaagatgcctttaaggtgtttcataaaaacgatacgagtttggcctttaaacagcaattaacgaccgaaatgcggcggctaattgaagcctatctcaataatttatttcaagaggcaacccagtctgatcagattgaattgagtatcatagcagattatcttgctggcgcgagtttagtgctcgtattcaagtggattgaagatgggttagtctattcaccacgctacatggctaagatgctttatcaactcgttcagatgccaaacatggcttttaatgtggctggattcttcgttgaagcgtaaatagctattgactcaatcgcaaatatttgatatcatatgaacgttgtaattgtgagctccacagctgcaaccgcgcatactaaggcattaagtactattattagtcaccttagttggcgagtctaagaaaaaataggaggtgcacacatgtacgcaattatcaaaacaggtggcaaacaatataaggtagaagctggtcaagcaatctacgttgaaaagttaaccgcagaagctggcgaaaaagtaacttttgatcaagttattttagttggtggtgaaacaactaaggttggtacaccaaacattgatggtgttactgttgatggtactgttgaaaaacaagggcgcgaaaagaaagttgttactttcaaatacaaacctaagaaacacagtcatcaaaagaaggggcatcgtcaaccatatactaaagtgatgatcgacgctatcaacgcttaattgagggaaataagatgattaatgctgactttatcgtcaatgcggattcgcaaattatttcttttcaaattacgggtcatgctgactcgggtccttacgggagtgatatcgtttgtgcagctgtttcagccgtctcaattgggacgattaacagtttgcaaaagctcgctggttttgaaccagaggtagaagcagataacctaaatggtggtttgttaacctgtcaagtgccggcaacggttacgggacaagctttggcaacggcgcagattctcttgcagaatttgcaactgacgctcgaagatattacgcaacaatacgggcagtacattcaagtacaaacaaaacgtaaatagacagttaataaacaggaggtgcatttagatgttacaaatgaatttacaattcttctctcaccataagggtggcggttcaacaactaacggccgtaactctgcaggtcgtcgtttaggttctaaacgtgctgatggccaaactgttacagctggttcaatcctttaccgtcaacgcggtacaaagattcatccaggtgaaaatgttggtcgcggtggcgatgacacattatttgctcttgtcgaaggtgtcgttcgtttcgaacgtttcggtaaaaacaagaagaaagtttctgtttatacagcagaagctaaataatgctttaaaaacactcacatttcgtgagtgttttttatttgcttaagatttgtcaggctgatttgtataaatcggtcataactggtatacttgtaactcaagcaacaaaccattgacaatctaactgtgagtgcggatcgctaacaagaagcgatttagcataactaaagggattggctttggccaatcccttttttacatacaatcagtttaaacgactggaaagacttgcttttaaacctgatttcttgctatgattagggcaatggcatccttttaaaaaagtacggaggaaatattaatgttatcagttaacgattttaaaaacggcttaacaatcgaatttgacaacaacctatggcgagtggttgaattccaacatgttaaacctggtaagggtggcgcttttgtccgctcaaaacttaagaatttaagaaccggcgctaaccaagaaaaaacattccgttcaactgaaaaagttgaaagagcaatcattgatacaaaatcaatgcaatatctttatgcagatggtgacaatcacgtcttcatggatacagatacttatgaacaattagaattaccagcagcacaaattcaagatgaattaaaattcttgaaggaaaacatgcaagtttcaatcatgatgtttgggagcgaaaccttaggggttgaactacctaagacagttgatttggcagttgctgcaacagaacctggtgtgcgtggcgatacatcttcgggtggtacaaaaccagcaacactagaaacaggcttagtggttcaagtaccattcttcattaacgcaggcgatgaattaacaattaatacatcagatagtacttacatttcgcgtgcctaacagcagcgtttaactgctggtaagaatttgttaggagggttattgatggctgaagaaacaaatattgtactagatacgcaagaaaattcattggggaagatccaaatggcacctgaagtggtggaagtcattttaggcattgccgcaagccaaattgaaggcgttcatcagatgcgtggaacaatttcatcatcgattaatgaattatttggtcgttcaaatcatggtaagggtgtcactttaaaagtgattgatggcaaagttaatgcggacgtttatgtctaccttaattatggcgtttctgtccctaaggtggcccttgccatgcaagaagccttgaaggaacagttgttatttatgactgacttagaattagcggaagtcaacgtacatgttgttggcgtcgtaaccgaaaaaacacaaaatattattgatccagatgatttatttaacgatgaaacacctgatctaaatggagaccaatcttaatgcctaattttaatcgacaccaaattcgacaagcagcttttcaagtgctgtttacactcaatgcgaatcaatctttagaattagaggatgcttatcaagccgtcttaacgatggatcaatttgatgctgaagaagtgacaccagttgaagtgcctgcttacttggctttcttagtatcaggtgtaactgaaaatcaagccgctcttgatgcagcattaaccccttatttgaaaaaaggttggcaactttctcggttggcaaaaccagaccttattattttacgattaggtttgtttgaaatgcaaaactcaaccgaagcacctgctaaagtcgctttgaatgaagcacttgaacttgcaaaacaatttacagatgatcaagcaaaaggcttcatcaacggcgttttatctaaattcgttgaagcttagtcataaaatgacaaaataaaagtaaattggttaactagtaaaatacgaacgaaattccttaaaacacgttaaaagtatttttttagcgtgtttttttaggtttaatgatcatttatcaacccaaaacgctaaaaaaatgactacttatgttaaaatggaatcatcaaatatcgatatataggggctgtgaattttggaattactagacggtagagcacttgcaaatgaattgacacacgcacaacaaacagcggttgaaacacttaaagaacaaggtgtaacgcctaaattagtggtcatcatggtcggtgatgatccagcgagtgcgatttatacgcaaagtaagcaaaaaagagcaaccaaaattggaatggcttcagaattgaagcgtctatcagctgaaacgaccgaagctgaattgttggccttggtgaaaacgctgaatgacgatcgcaccgttgatggtattttggtgcaattgccattgccaaaacaaattaatgaagatcatgtcatccaagcaatcgatgccaaaaaagacgttgatggttttagtcccgttaatattgggcaattatggctcaaccaacaaggattagtggcctgcacccctaatgggattatgcgcttattagcggcccacaagattgatgtggctggtaaaaatgttgtgattgtcggtcggagtaatattgtcggccgacctttagcagcgttgatgctcaatgctaacgcaaccgtaacgattgcccacagtcgcacagcaaatctaaaagccttaactaaaacggccgatattttggtagcagccattggtaaaccacactttttcggaattgatgctgtcaaagaaggcgcggttgttatcgatgtcggcattaatcgccttgaagacggttcagtcactggcgacgttgatttcgaagcccttcaaacacacgtcagcgcaatgacgccagtgccacgaggtgtcggaccaatgacgattacgatgttaatggaacaaacgattgaaattgcaaaggaacgtgtcaaacgtggttaaaccaactgattatttaacagtcaccgctttaacgcaatatttgaaagctaaatttgaacgcgatccgtatttggatcgggtttatttgactggtgaaatttccaacttccgcttgcggcccaatgcgcatcaatattttagtttgaaggataataaagctaaaattagtgccattatgtttaagtcggccttcgaaaaagtgaagtttacgccggaagaagggatgaaagtcctcatagtcggccggatttcgctatacgaagcctctggtaactatcaaatctacgttgaacgcatggaacctgatggcttaggtgccctgtatcaagcctacgaacaattaaaggcgaagttagcaaccgaaggcttattcgatgcccctaagcaacctttagtccgtttccctaaaagaattgcggtcattactagtccttccggggcagtgattcgcgacattattacgactacccaacgacgctatccaattgcacagttagtgttgttcccagcagttgttcaaggtgacggtgcggctgatgttttagttgagcgacttaaacaggttaatgaacacggcgactttgatacgattattatcggtcggggtggtggctcgattgaagatctatggccgtttaatgaagaacgtgttgcacgggcgattgtggccagtcagattccggtcatctcatcagtgggtcatgaaaccgatacgacgattgctgatttggtcgcggatgttcgagctgccacaccaactgcggcagccgaattagcaacacccgttttaacggatgaaattttaaaattacaacaacagcgtttacggttatatcaagccttttcaaaaaccgttgcgcttaataaaaaacaactcgatcatttacaaaatagttatgtcttgaaacagcctaaacgtttgtatgatggctatctccaaaatgttgaccaactacaacggcgcttattgactgcacaacagcaactcttaaaggatcggcgccaacaggttcaattgttgcaacaacggttatcggcacaatcaccattgatggcggtgcgacaagcacaaaaagacgttactgaacaacaacgacgtttaaaccaagcgatgaaccgcttgatggctgatcgccggcaaaaggccgcacaagtcattgcagcactcgatttagtcagtccgttgaagattttaggccgcgggttcgcctatgtcacggatgatcagcaacaaatgttgaaaaaagtggcagattttaaggcccaacaaccgattgaattacacgttcaagatgggttagtaacagctgaagttgtcgcaacccataaaggagaagaataaaatggcagaaaaaaaattaacgtttgaagaaaatttagcgcaattagaagtgattgttaacgagttggaaacgggcgatgtcccgcttgaaaaagcaatgacggcctttcaagaaggtgtcaaactcagtcaaacacttgaagaaacattgagccaagctgaaaagacaatggctaaagtaatggccgataacggcgaagaagtaccattagatgctgaggagcaacagtaatggctgattttaaacaattagcggcacgtgaattaccgcagtttgacgcttatttaaaaaatgaattggccaaaattcaagaaccaacgctgcaaaaagcgatgacgtactcggtcatgacaggtggtaaacgattacggccactcttattatttgcggtcttagaaagtgccggtcaaagcattgatgaaactgcttttagagcagctggtgcgcttgaattaatccatagttactcgttaatccacgatgatttacctgcaatggacaacgatgatttacggcgcggccaaccgacgaaccataaggtctttggtgaagctgaggctattttggctggtgatgggttattaacacttgcgtttgaatggttagcgacattaaacgtgaccgcagaacaacgaatcgaacttgttcggttgttagcgcaagcggccggtgccaacgggatggttgcggggcaagtcgaagacattgaaggcgagcacaaagcgttgacattagcgcagttgcaacaagttcatcatcttaaaacaggttgtttaattgaagtcgcggtggccatgggcgctgtcttagcgcaacttggtgaggttgaaacaactgctttacgcggttttgcgcaacaatttggtttggcctttcagattcaagatgatatcttagatgtcaccagtaccactgtggaaatgggcaaagctgttcataaagatgccgcagaacaaaagaataccttccccattttattggggttgtccggtgcgcaagaagcacttcacacgacttgccaacaagcacaacaacaactggcgcaagtcacgacttttgaccggactttattaaatagttttttggactatttcaacgaataggagaacagatgaaaaaagaacgggtagacgtactattagtacaacaaggtttatttgaatcacgggaacaaggcaagcgggcaattatggctggggaagtttatgggaaaaatgatgaacgaattgacaagcccggcgaaaaaatcgacgccgaaaccgtattaagagttaaagggcacaaaatcccatacgtgggtcgcggtgctttgaaattggcgaaggccatcgatgtttttgatatcgatcttaaagataaattaacgctggatatcggttcatcaacaggtgggttcaccgatgttgcgttgcgtaatggcgcacggcgctgttatgcgcttgatgtgggttataatcaattggcctggaagttgcgtgaagattcccgcgtagttgttatggaacgggttaacttccgttatagccaaccagaggactttactgatggattaccagactttgcaatgaccgatgtttcctttatttcgttgcataagattttggtacctttaaaaccaattctcaaacctaattgtgatgcggtggctttaattaagccccaatttgaagcgggtccagctaatgtaggtaaaaacgggattgtccgtgatcctaaggttcataaaaatgttgtgacagatatcgtcaactttagtttagcaacaggctacgatgttttaggtcttgatttctcaccaattaaaggtggcgaagggaacatcgagttcttgatccatcttagaaatacagaagccgagacgggcacacttgctgaaaatgtgaatattgatgcggttttagaacgagcttatgcagaattaaaacgaccttctggaaaataatgcataaatctttgtattttatgtataaatacgctatcatgtgagttagaattgttattcacaagaagaggtgtttttgatgcgtaaagtagaccgacaacgactgttgagaaatttaattcaaactcatgaaattgaacgccaagaagattttgttaaactcttgcaggcggaacaaattgaggtcacgcaggccacgatttcgcgtgatatcaaagaaatgcaactggtaaaagtccctaatacggacgaaggctatcactatagcttaccgcttgaaaaaaaattagatgttaaagaaaaattgcgacggacattacgagatgcctatgtgacccataatcaacaggattattttgtggtgattaaggcgcatcctggtaatgcgccagcaattgcaagtttattagatcaattacaatccgaagatatttttgggacaattggtggcgatgacacggtccttattatttgtaaatctgaggaacaagcaaaacagttcagattatttatcgaagacttgctaaagtaatttagcaagtttttttaagattaggaccagatgaaaggggcattttcaaatgctacaagaattagtcattcacgactttgcaattatagatcaattggccattagtttcgatgaagggatgacggttctttctggtgaaacaggggccgggaaatcgattattatcgacgcggttggcctgctcgctggtggtcgagggtcacaggattttatccgaaccggtgcgaaaaaagcgacgttagagggcttgtttacatcacccgaaaacgccacgactgccgcgcttttagctgaatatgggattgaacacgatgatcaaaccattttattacaacgtgatttggcattaaacgggcataatgtttgccgtgttaatggccatctggtcaacactgcgacgcttaaaaagattggagaaacattagttgatattcacggtcaaaacgaacatcaagaattaatgtatcctgatcgccatctaggcttgttggatgagtttgcccacacagctttggcgagtgcaaaggcggcctatcaagaaacctatcaggcttaccggcaaacggaaaaagcgttgaagaagaaacaacaaaatgagcaggaatgggcccaacgccttgatatgcttaaatttcaaactaatgaaattgacgccgcgcaattacaaccagatgaagaaagtaagttaatcgaagaacgcgcgaaactcagcaacttccaacggattaatcaggccttgcaagctagtcgcgccattttatctggtgaagaaggcaacgcgctagatcaaatcgcgattgcgatgaatcagatgcaagaaatcgcggaattagatcctgaattcaaaagaattgccgataatctacaaacaggctattacacactgcaagatagcggtagtgatattagtcgggaagtcgataatcttgaatgggacgaagcgcgcttggatgaaattgaacagcgcttagaaacgatcaataatctcgaacataaatatggcgattcaattcctgaaatcttagcttatggggcgcaaattaccaaagaattgcaagcgatgcaggccacagaagccaatgcaagcgaattagagcaacaatttgaacaacaacaagcccaattgctgcaagaagcagccgttctttctgagaaacgccaagctgctgctcaacagttggaaaaggctgttcaccaacaactcaaagcgctctatatggctaaaacggttttcaaagttgaatttgccacggttgatgaccagcaatttatgcgtagtggtcgggacaaagttgaattttatattcaacctaatccgggtgagaagctacggccgcttgccaagactgcttctggtggggaattatcccgattgatgttggcgcttaaaacgattttctcagaatcacaaggcgttaccagcattatttttgatgaagttgatactggggtcagtgggcgtgttgcgcaagcaattgccaataaaattagcgaaattgcccaacactcacaagtcctctgtattacgcatttgccacaagtagcggcgatgagtgatcatcaataccaaattcaaaaacaaattaaacaaaaccgcacagaaacatcaatccaaaaggtaaccggtaaaaaacgcgttgctgaactggctcgtatgttggcggggacagaagtgacggaattaacgctagaacacgcccaagaattagtggacctcgcagaaactgctaaagcacagattagacaagcttaataaagaaggggttaggacttgttgtcctaaccccttctttaacggtcatcgtctattgttagttattttttgagatgtagcgaatttgatttaaagtaacgattttataaagattagagtgattttcttttaacaagtaagttttatcatcaagttgtttaatcaagcgcccattgacttgttcgatgtgctcggccacgttaaattggatagccaaacggtaatggcgatcaaaagcttgcatcatataaagttgaatttggctaggttgcatctggggttgttcgattaattcttgggcatcatcgagttcgaaaaagcgttgataccgtttcaccaattcatgactaaagccgactactgctgattgtttgatttccataacgtgttgtcctccgaacatttgtttgtattcctattatacgaacaaacgttctaatctgcaagcgcaaatttaaatttttttcgtgtataatagattaaacgatgagaaagggtgattttatgagtgatatcaactacaaaattatggctgaaattggggtcattagtgaagataaggcgggctggaagaaagaattgaacttaattgcttggaatggtcgcgcacctaagtttgatttacgggactgggcacccgatcatgcgaagatgggcaagggcatcacgctcaccaatgaggaagttgcacaattgcaaacaatattaaatgagatgaacctaaagtagacttgtaattggcagtcatctagtgataaaatagaacttaactattttataaaagaagagggaattacgtagatgtccaatcgaggaatgttgatcgttttatctggcccatcaggggttggtaaaggaactgtccgtcaagcaatgctagaagatgaatttcgtgattttcactattcagtttcgatgacgactagaaagccaagaccaggcgaacaagatggtgttgactactattttgtgagcaaagaagaattcgagcaagaaattgcaaatgatggtatgctagagtatgcacagtatgttgataattattacggcacaccgatgaagtatgtcaatcaaaccttagaatcaggccgcgatgtcttattagaaatcgaagtccaaggtgcgatgcaggttcgtgagaagtgtccagatggcgtgtttatctttttaacaccgcctgatttattggaattacgtaatcgaatccaaaaacgtggcactgacgatcaagcaacgattgataagcgcatgcaaaaagcagccgatgaaattcggatgatggaaaattatgattacgctgttgtcaatgatgaaattccaaacgccgttcaacggattgaaaagattattgagagtgaacacttacgagtaccacgtgtgattgatcaatataagaaaatgataggggaataataaaatgattgtatatccttcaattgataagttactagaaaatgttaactcacgctattcattagccgttttagcaagcaagcgagcacatcaaatcgaagctggcgatttgaaaatgttatcagaatacaaatcacctaaaaccgtagggatggcaatggaagaaattgctgctggcaatgtaaccattgatcctgattcattgatgcttgaaaaagatgctgaaaaaatggataagctttctcaaaaagatggcgaataagaataattagcgaaccgcatttttagtttattcatcgtgggatgtctaaattaagaggcggtttttttatttaaaggaggtttttaaaatggtgagtttagaaaacaaacacgttacggtttacgtaaccggtgggattgcggtgtacaaggtcgctagtttagtgcgtcagttgattaaaaatggggcaattgtccgcgtggcaatgacgcaggctgccaccgaatttgtgacaccattgacctttgcgacattaacgcggcaagaagtgctaactgatttaatgacgatgaatcacccagaacaagtcgcccacattcacttagctgactggaccgaattggcaattgttgcacctgcgacggccaatattgttggcaaattagcgaacggcattgcagatgatttcgcgaccacggcacttttggcaactacggcgcctaaattattggtgcccgctatgaatgaacatatgtggttaaatcctgcaacacaacgcaatttaacacaattaaaagcagatgggattgcgattgtgcaacccgctactggttttttagcggaaggctatgaaggccaagggcgttttccagaagaagatgtgattatgagcaatgtttaccgccaattaacccctaatcgtttgcaagataaagtggttttagtgacggccggtgggacgcaggaacctttggatccggttcgctatattggcaaccggtcatctggtaaaatggggtatgcgattgctggaatggcggctcaaatgggtgcgaaggttactttgattagtacgcggccagaactggctgtccctgctaatctggcacaagtcatctatgtccgaacggcagccgaactgcaaggggccgttgctagtctatataatgaagcagatgtcgtgattatggcagccgctgtcgctgattttaaaccggcgcaatacgtttcacaaaaaattaaaaaacaagttggtcaaactgatatgacgcttgaactcaatcggacgccggatattttagcgacgttgggtcaagaaaagaaaaagcaatatctagtgggctttgcagctgaaaccaatgatttgatggcgcatgcgcaagtcaaattaacggctaaacaggtcgatttattagtggccaatgatgtcagccaaaccgaccggggctttggcgctgaccaaaatgcggtcactcttttacgaccaaatcaggcaccagaagcattaccattggcttccaaaaaagtgattgccacacaaattttagaacggatcagtacagcgcttagctcaaaggaggaatagcatgccacagattgctaaagtaatcgttgatgtgccgacaatgcaaactaatcggccatatgattatcaggtaccggtcactttagttgatgtcattcaacctgggatgcgggttattattccgtttggaaatggcgatcgtaagattcagggctttgtcttgcaagttttagaccagccaagctttacgggccaattaaaggcaatcgaggcagttgttgatttaacgccagcggttaaccctgaattactatcactttcggattggttagcacaacagacgtatgcttttcagatcacgtgtctgcagacgatgttacccagtgtgatgcgggctaaatatacgaaaactgcgacgttaactgatgaaattccaacggacttacaggccagtctgttcaatggcaatgatgagttgacttttgatcagaatctggcgcctgataagttaaaacaactcatgcaattgcaacgccaaggtaaaattagcgtcacttatcacgttgacaaccgggcacaagttaagcaattaacggcgattgagcccgcactgagttttgaacaattggaagaagcacggatgggtttacgaaagtcagcccagaagcaaagccaattaatcagttatctgcaaacgctgattgatcaagaggcaccgactttattaaaaacgattttagaaaaaacaacttttacgcgggaaaatattcgaatcggtgcggaaaaaggctggttacgccaagttaaggtggaagcttaccggaatccgtacgctaatgctgttcaaccaacccacaaaatgacgctaacgagcgaacaagaaaccgcagttgatgcggtcgttcaatccgcatcaacggatgcctcagaagtattcttaattgaaggtgtcactggcagtgggaagaccgaagtttatttacaaacaattgatgccgtcttgcaacaagggaagaccgcactgatgttagttcctgaaattgccttgacgccgcagatggtgcaacgcgtgaagggccgctttggtgatttagtcgctgtgttacatagtggcttgtctgaaggcgaaaaatacgacgaatggcggcgcatagaacgcaaagaagcgcgcgtggtcgtcggtgcccgctcagccgtttttgcgccacttgaagatatcggcgtgattattatggacgaagaacatgaagccagttataagcaagacgaaagtccccgttatcatgcacgcgacgttgcgatttggcggagtcagtatcataattgcccggtcattttaggtagcgccacaccatcgttagaatcccgggctcgggcgcaaaaagatgtctaccatctgattcgcctgacgcaacgggtgaaccaacaagccttaccagctgttgaactagttgatatgcgcgaagcgatgagggttcaaaaagccagcaacttttcaccggcgttattagccggcatcaaagaacggatgcaaaagggcgaacaaagtgtgttactcctaaatcgtcgcggtttttcatcatttatcatgtgtcgggattgcgggtttgtcttgcagtgtcccaactgtgatatttcgttgacgttacacatggatacgcattcgatgaaatgccattattgtgggcacgaagaagccattcctaagatttgccccagctgtcagagtcgtcaaattcgctattttgggactggcacgcaaaaagtcgaagctgaattacaagaattaatccctgaagcacggatcttgcggatggacgttgatacgactcgcaaaaaaggcgcgcatgctaaattattgaaaaaatttggtgatcacgaagctgatatcttattagggacgcagatgattgccaagggcctagatttcccagatgtaacgttagtcggggtgatcaacgctgatactgctttgggtttaccggattttcgggcgagtgagcggactttccaattattaacgcaggttagtggtcgtgcgggtcgtgcagataaggtggggcaagtgattgttcaatcttataatcccgagaattacgcgattcaatttgccaagcagcacgattatgaaggcttttatcaatatgaaatggcggtgcgccaccgtggcggctatccgccttattactttacggtgaaggtgacggttagccaccctgaagaagcacttgccgcaaagaagagttttcaaattgccaaacagatgcgaccgattttatccgaccaagcactgattctcgggcccaccccgaaatcaattgctcggattaataatcgttatttttaccaaattgtgattaaatataaacaggaaccacaacttcaggctaaattagccgaaatactagagaccacccaaatcgatactcgtcacgggtttaagattgggctggataatgaacctctacaatttacttaaaagtgagcgtgattgattaatgacatccatcgtatttatgggaacaccccaattttcagtaccaattttagaagcccttgtggcaaacgactaccaaatcttggcagttgtgacacaaccggatcggaaagtcggtcgtaaacaagtgttgcaacaaacacctgttaaagaagcagcggttcgactagatctaccagtattccaaccagaaaaactcagtggcagccctgaactggctgacgtgattgccttacaaccggatttaattgtaacggcagcttacggtcaattcttaccaacaaaattattagaagccgctaaaatcgctgcgattaatgttcatggctcattattgcctaaataccgtggtggcgccccaattcaatacgccgttttaaatggcgactcagaaatcgggattaccatcatgcacatggctaagaaaatggatgccggtgatatgatcgaacaagctagtattccaattgaagccacagacgataccggtagtttattcgataagttaagctatgttggtcgggatcttttattaaagactttacctgggattattgcacaaacagcccctcggacaccgcaagatgaagtgcaagtgacctttgcgtataacattaccaaggaacaagaacaattagacatcaaccaacctgctgaacagttgcttaaccaaattcgcgctttacggcctcaaccaggggcttggttagccgttaatggccaacggactaagatttggcaagcgacagttgcagaaacaacaactgatcaagccgccggcgtagttgtcgcgctaaataaaaaagatttcgaattagctgccggtaacgggactgttttaaaaatcactgaaattcaaccggccggtaaagccaagatgccagtgcaatcttatttaaatggggttggcaagcaactagcagtcggtcaacaagtggtggtgcaagatgccgaataagacaccgcgctacttagctgttgaaatattgacggcaattgccaaacaaaatagttattcaaacttggcattagatcaagtaatcaataagaatcgattaaacccacaagatgctggttttttaacgcagcttgtttacggtgttattcagcatgaatacacgttggattattatctagcacctttcattcaaaagccgaagaaaatggacaactgggttcgccaagttctcagaaccgcggtttatcaacaagtttatttggatcgcgtgccagaacatgctattttctacgaagcaactgaaattgctaaaaaaatggggcatgcgggggttgctaagctcgtgacggcgattttgcggcagttacaacgcagtggtttaccggatctcaatgcgattgctgatccaattgaacgtcttagcgtgcaatacagcgtgccgcaatggttggtggcaaaactgcaagctgatttaggggatgataaactcgaatcattgctcgcaacaattaaccaaccagccaacgcttcattgcgagttaatacgcgggtcaatacggttgatgccatattggctgagttacaaccgcagtttaatgacctccaaccgagtcagattgctaaggttggtttggtcgcacaaggcggtcatttggccagtggtgcgttatttgaagcgggcgattatacgattcaagatgaaagttcaatgttagtcgcacctagtttagacattcaaccaggggaccaagtattagacgcttgtgccgcacctggtggcaagacaacgcatatggcaacttatttggatgcgcaacaaggcggtcaaatcacggccttagacattcatgaccataaagtccgcttgattgagcaaaatgcgaagcggctccatgttgaagatgttgttagcgcccaagcactagacgcacgtaaagtgggcgaacagtttggtgaggcacatttcgataaaattctagtcgatgcaccttgttctggtttagggttaatgcgccgaaaaccagaaattaaatatagccgccaaccagcggacttgattaatctacaacgaattcaattagcaattctagatgccgtggcgcctactttgaaagtcggcggacgcctaacttatagtacatgcacgattgttccggaagaaaatcaacaagtggtggcggccttcgttgctaaccatccggagtttgaaattgaaccagtgccacttgaattaccattagcgcagaatcaagcaagtccttttgtccaaatctatccagatgattaccaaacagacggctttttcatcgcttgtttgaaacgacgggcataactacaattgaggtgattttttatggaagttgcatatcaaacagatgtcggtcaacagcgacagaataatcaagattatgttggtttttatactaatcaacgcggtgttcaatttgcaattgttgccgatggaatgggcggtcatttaggaggcgacgtggcctctgaaatggctgtttcccatatcggacatgaatttgaaaaaacagatgatactgatattgaagcgatggttaagtggttgatttttgaattacaaagagaaaaccaacatattttagccaaagcgaatcaatatgacgatttatcggggatgggcacgaccttagtggcagtcttaatttccgggacgcactatttagtcgctaatatcggcgatagccgcgtttaccgtctcagacgcaatacgttacgtcaattaacggaagaccactcattggtcaatgaactggttaagcaaggggaattaacggcagaagccgctaagcatcatcctcaaaagaatatcatcacgcgcacactgggtgtttctcaagaggttgatgcagatgtgacgatttatgaattcgaaccagatgactacttacttttatgtacagatgggttgaccaatatggtcgatgacgatcaattgcaacaaaccttgatggcagagatgacgctggaagaaaaatgtgccgccttaatccaaaaagcgaacgaagctggcggcatggataacattacggcactcatcttacatcacgaaggtgaggtgcctacgccatgatggaaacagggtacgctgtagcggggcgttataagattattcggcccattggtgaaggcggcatggctaatgtttatttggcgcaggatctaattttagaccggcaagtggcagttaaagttttacgattagatctccgaaatgatccggatacagtccgacggtttacgcgagaagcgttggcaacgactgaattaaatcatccgaatattgttagtatttacgatgttggtgaagaaaacagtatgcagtacatcattatggaatatattaagggcaccgatcttaagaaatatatcgtggaacactttccaattccttatcaacgtgtaattgatattatgacgcagattttatctgcggttcaaaacgcacatgcgcataatattattcatcgggatttaaaaccacaaaatattttggttgatgaagacggcaatgttaagattagtgactttgggattgcgattgcgctcagcgaaacagcgatgactcagaccaacacgttgttggggtctgtgcattatctctcaccggaacaggcaagaggctcgatggcgacgaaacggtctgatatttactcgttaggaattgtgctttatgagttattgacggggatggtgccttttgaaggcgagtccgctgtttcaattgcgattaagcatttccaagatgaagtcccaccagtacgcaactatgatccacgtattccgcaagccctggaaaatgtcgttttaaaagcgactgccaaggatccggatgaacgctatagtggtgttgatgccatgatggctgacttagcaacttctttatcagctagtcgtgcgcacgaacctaaatttgtgccatcaaaagcggatgatttgagtgagactaaggtgattcctgcactagatccagaaggcattacgcaaaccaacaacgatgaggaacaagttaaagaagcagaatcaactcagaaaaaggttaaaaagccagctaagtctaagcgtaagtggtggctactaggtggcggtgttgttttattgctgttattagcaacggtgattgcttttgcagttcaggggagcgaagtaaccgtccctgatttaacggatatgacacaacaaaatgcggaatctgctttgaccgataaaaaactgaaagtcggcacggttcaaaaaacaacgagtcagaaatacagtaagggccacgtcattcgaacaacacctaaagcgggcctgagtgtaaaatcaaaaagtacggttaatttaattgtcagttcaggacgccaaaagtataagattaaagactatacgaaccaagcatatagtgatgttcgggatgctttgaaggataaaggcttgaaagttaaacggaaataccaaagttcatctgaagtgagtcctgggttgattatcgatcaaagtattgcggctggcaaaagggtcgttccaagtaaaacgacgattaccttaacagtcagcagcggcaaacctggttttgcattgcataatctaagcaactatacaaagcaagggattcaagactatgctgcacaaaatggtttaacggtcgtattctctgaagaatattcatcaagtatttctgaaggaatggtaatcagtcaatcgcctgcaagtggtacaatggttcaagaaggtgatagcgtaagcgttatcctttcaaaaggcgagcaaccaactgaacatcattctattgtgacgtcgagttcaaattcagttatcgagtcgagtgcgcctgaatcaagtcaatcgagtgaaagtagcgcgagtgagtcagagagcgaatcagagagtgaatcggaaagcgaatcagcaagtgaatcgatcagtagttcagctagtcaaagtagtcaatcgagcgttcaatcaaagtaatctttagataaaataagttactaccgtattttacgggaggattaagcaattttagtagataaccacagaacaggttaaaaaataatgggaggtgacctattgcagaccggacagattattcgtgccctcagtgggttttatgatgtacaaagtgagcacaaaatttatcgaacacgggctcgaggtaattttagaaaacggaaaattacgccattggtcggcgatttcgttgaatttgaaagtgaaagtcaaacagaaagcggctatatcttagaaattttagaccgcaaaaatgaaatgattcgaccaccagtagcgaatatcgatcaggcagttgtcattgtttcggcagtcgaacctgatttttcgttaaacttattagatcgtttcttgatttatttagaaagtttgaatattcaaggcctcgtttatttgacgaaaaccgatatgatttctgacgaaaaatatcaagagattaagcaatatttggattactatgaaaaagtgggttatccaacttttgcacccagaacggcatttacaccagagattattcaagcgattgaagacacattccctgataaaacgaccgtctttacgggacaaacaggggctggtaaatcaacactgcttaatcacattgatcctaaattgaacttagcaacggctgaaatttcacaaagtttaaaccgtgggaagcatacgacgcgccatatcgaactaattccattgaacgatggattggttggcgatacaccaggattttcatcactgggcattttaaatgtgacgagtgaaactttagtgagtcgttatcctgaatttagagaaattggacaagattgtaagtttagaacttgccaacatgtgatggaacctaaatgtgcggttaaagcggccgttgatgctggtgaaattatgcaaagtcgctatacgaactatttgcaattccgggccgaattaaaggatatccggcctgtttataagaaatcaaaataagaaattggatgggagtttttaaaatgacacaaatcgcaccttcgattttaagcgcagattttatgaatttacaacgggatgttcaaaaccttgaggcagcaggtgccgacctattgcatattgatattatggatggcatgtttgtacctaacatgtcttttggcgcccaagtggtcagcggtattcgtccgctaacacaactaggcttagatgttcatttgatggttgaacaaccagaacgctacattgaacaattcataacagctggttctgatttaatcatgattcacgcagaagcaacagaacatctttatcgtggtcttcaaatgatcaaagatgctggtgttaaagctggggtggtcatcaatccagggactccagtgagctacattgaatctgttttaccattggttgatcaagttttagtaatgacggttaatcctggttttggtggtcaaaaattcattccagcaatgttaacgaaggtcgctgaattagcggcttatcgtgaagcacacgctgatgctgattttacaatcgaagttgacggtggtgttaacgaccaaacaatcgcagcctgtgccaaagcgggcgctgatgtctttgtagcgggttcatacacatttgctggtgatttagcaacacgaattgaaacccttaagaaggctgctaatgaagcgcgttaatttattggcaggtggtccagttgatcagtgggcatcggaattagcaacaatcacaacggtcccaggacaatggattacggccgatcgtgggacgttacgcctattgcaacaaggcgtgacacctacgattgcggtcggtgattttgattccattaccccggctgaaaaagaacaggtactagcggcggtcagtgatattcgttcggttcaagctgaaaaagacgaaacagatacgcaattagcgttatcgattgcctttgaagaactacaggctgaccgtgtggtggtctacggtgcgactggaggccgaattgaccatttcttagccaatctctttatggcggtcgaagaacgctttagaacggtcctcaatcgcattgagatgcgtgaccggcaaaatacgattcaattctatgcgccagggacgtatgagctgacaaaagaggctgataaaaagtacctcgcgtttatcccgctcgtgccaacgacggatttaaatttagtagatgagaaatatccactcacacattttgatacgacggtcccaatttcgtgggctagcaacgaattcatcggcgaaaaagcgcattttaattttaaaacgggcatcgtagcggtgattcaaagtaaggattaaaagagtgcgtttgaaacggtttgactttgagcattagcacagctcggcgaataactgctgcaagcagttatttgacgagtgacgctaagcacagaagtcagtttcaaaaagcacgtttaagccattaaaattcgaatataaaaaggctcgacaaatttattttgtcgagccttttttgatggaaacgtgcttttgccagtaactttctgcgctttgctacacttgtcaaaccggcgatttcatcgccaattcgccaagttatgcaaatgctcaaaagctaaccactggcaacgcactctatttttgcgcaaaaaaatagattgtccgaagacaatctaagaaacgaaattaaacacgagtaactttgcctgatttcaaagcacgagcagaaacccaaacacgtttaggtttgccatcaactaagatacgtactttttgtaaatttggcttccaagaacgacgagatgcgttcaaagcgtgtgaacgcttgttgccaaatgatgttttacggccggtaataacgtcttttgccatggtctattcctccttttagtaaagccggtagaagaattaacgagaaacataatatgattcagttagtcttaatagttgcatgcatgcacaccggcttacacaattcacttaaacaatttaccataatagttgagctaatgcaagaactcttacaaggaaaattacttgacaggtcattttttaagggtagtatctaataaaagcatgcgttatactaagcaatacaggttcgttaaagtactttgaaagttatcggagctatgctaaaataacattaagtatgtcacaaggaggctattttaatggctgttaaaattaagacccaatacggcgatatcgatattacgaataatgtgattgccactgtcgttggcggtgctgcaactgatatttatggcatcgttggtatggcaagcaagaatcaaattcgtgacaatttaaatgaaattttaaatcgtgaaaattacaatcggggcgttgttgttcgtcaagaagaaaatggcgtggcaatcgacgtttatattatttgtggttatggcattaagatctcagaagtttgccgtaatgttcaaagtaaagtgaaatataatcttgaaacaatgttgggtgttagtgcaaactcagttaatgtttatgttcaaggtatacgtgtattagaagactaaaataatgagcggagctggtggttaaagccagttctatttgttttcgttcgaggaggaacattcgtgaaagttactgaaattacagcaaccgagtttcaagcaatgatgcgtgttgctgcacatcgcttaactaaaaatgcagaatttgtgaattcattaaacgttttcccggtacctgatggggatacaggaactaatatgagtttaacttttcaaagtggtgctaaggcggttaatgaaaataatgcgcaagcagttggtgaattatcaaagagcttagctaagggtctattaatgggtgcccgcggtaactctggtgtgattagttcacaaatcttccgtggcttttcaaagagtatggaagaaaaaacaagtttaacggcccaagatttagcagatgcttttacaagtggcgttcaaacagcgtacaaagcagttatgaaacccgttgaagggactattttaacagttgcgcgtgaaggtgctaaagctggtgccaaagtcgctgcacaaacagatgatattggtgcagttgttgaagcggtcgttgaaggttctaagaaggctttattgaagacgcctgaattattacccgtcttaaaagaagtcggcgtcgtcgattctggtggccaaggcttagttttcatatatgaaggtttcttagaaggtttaacaggtcaagcacctgccaaggatctttatacacccgatgaagctgaaatggatgaaatggttaacgctaaccatcaccaaacagcacaaatggggactgaagaaatcgaaaatggttactgtacagaaatcatggttgcacttggcgatggtactactgttgatcgcgaatttgactacgatgaattcagaaatcatttaaatggtattggcgattcattattagtcgttgccgatgatgaagtggttaaagtccatgtgcatacagaacatccaggaacagtgatggcttatggccaacattttggttcattgatgaagatcaaagtggacaacatgcgcttgcaacatgatacaattgttgaaaatgatcaacaagcagcacccgttcaagcggaaccagttgatactgggattattgcgatttcagctggtgctggtgtggcagaactcttcagaagtttaggggccacttatattttaagtggtggtcaaacaatgaatccaagtacgcaagatattttggatgccattcaagcagctaacgcgaagaaagttattttattaccaaataataaaaacatcttcttagcggcggaacaagctgccgaagttgctgaaattccggttgaaattgttcaaagtcggacaatcgcacaagggatgacagctctcttgtcatttgacccttctgcagaattgcaagctaaccaagtagcaatgactgaagcacttgatacggtaattagtggtcaagtgacacaagccattcgcgatacaacgcttgatggtcttgaaattaaaaaagacgattacatggggattatcgacggtaagattaaggtctcaactgctgatcgccaaacagctgccatcgaaatggttcaaaccatgttggatgaagacagtgaaatcgtcacaattatcgttggtgaagacggtgatatgacagaagctgaagcaattagtgatgcaatcatggcccaagacgatgaattggaagttgaaattcacgaaggtgaccaacctgtttatccatatttaatttcagttgaataattaatcaaataaaacaggaatggggctattaaaaatacctgattcctgttttttagtagaagtgtgtttgaaacgttttgactctgaggattaacttaatttggcgaattggtgatgcaatcgctgatttgacaaatgttgttaagcgcaagagtcagtttcaaaaagcacgttaaaaaagaagtgcgttcaaaccggttatcattcgaggactagcctagtccagtgaatgagtgatgaagtcattcgtttgcgggacatagctagccacagaaggatggtttgaaaagcacgtttaagtcatcaaaaaacggaggtgctgtcagtgttaagtttaacggattctgtgactgttttaacgggtgttggcccgaagcgtttgacagccctcaatcaattaggaatcgcaacaatcagtgatctattgtattattttccgtttcgttacgaggatttaaaggttaaggatctctcagaagcggtcgatcaggaaaaggttaccttaaaaggaaccgttgttgctgatccagtcgtcagtcgttggggaccgggtaagacacggctaaacgtccggttattgattaatcatgatgtcattatggtgacttttttcaaccaaccttacttgaaggataaatttgaagccggtgttgatattgctgtttatggtaaatgggatgctagacggaatagtttaaccgggatgaaggttttagcggttcaatcggctgataatccttcgttcgcggcgatttattcaaccaataaaaacgtgcgtcaaggcacgctcgtgaaattgattcgcgaagcatttgataattatcaaagtgtcattccggatttgattccagctgatattcgtgagcggtataaattagtttctgaagtggaactgattgccggaatgcattttccggaaagctatccagaagcaaagcaggctcgacggactgctattttccacgagtttttcttgtatcaactgcagttgcaggcgattaaacaagcagaccgccatgttgaaaatggcttagcactgccttatcaaaacgcagccctcaaggaatttattaagacattaccgtttgatttaacggatgctcaaaagcgggtggtcaacgaaatttgtttagaccttaaggcaccggcacatatgaatcgccttttacaaggggatgttgggtctgggaagacgattgtcgcggcgattgcgatgtttgctgcggtgacggccggtttccaagcggccttaatggtgcccaccgaaattttggcggaacaacattatcagagcctacaaaagctttatgcaccaatgaatgtgacggttgggttactaactggttcgacaaccgccaaggagcgccggacgttgttggcggatattgaatccggtcggatcaatatcattgtcggcacgcacgcacttattcaagatgccgtggtttaccataagttaggctttgccgtcattgatgaacaacatcgatttggggtcaatcaacggcgcgtgctacgtgaaaaaggcttgcagcctgatatgctggcaatgacagcgacaccgattccgcggactttggcgattaccgcctatggcgaaatggatgtttcgaccatcgatgagttacctaaaggtcggattccaattgaaaccagttgggtgcgtagtaaccaggttgaacaagcgctctcgtttgttcaaaaacaattagctgacaactcgcaagtttttgcgattacgccgttaattgcggagtcggaacaaatggatctcaaaaatgcggaagaaatatacgcgactttggcggagcggtttgagccgcagtgccatgtggcactattacatggtaagttgaaggatgatgagaaaaaccggattatgacggctttttcaaataacgagattcaactactggtttcaacgaccgttgttgaagtcggggtcgatgtgcctaatgcgaccgtgatgatgatttttgatgctgaccggtttggcttagcccaacttcatcaattgcgtggccgggttggtcggggtaagaaaaaggcctactgtctattgattgccgatcctaagaatcaacaaggtgtagatcgaatgacgatcatgaccgaaacgaccaacggttttgttgttgcgcaaaaagatttggaattacgaggccctggtgaggtctttggcgatcggcaatcgggattaccagtcttcaaggttggtgatccagtcgctgattttgtcagcttacaggtcgcacaacaagaagtacaaaaaatcttcacggttgatcctacttttagccaaccggcgtatgcgcctttaaaagcgtatctcgcacaacaaaaacaaaactatcaaacattagattaatgaaagaagaggaagtagcatgaaagtagcagttgatgcaatgggcggcgatttcgcgcctcaatcagtaatcgaaggggttttacaagcccgttcagaatttacggacctagattttattctatatggcgatcaagcacagactgaacccttaatcgatgatatgacgcgcttaacaatcgtgcataccacagaaaaaattgcgagtgatgacgaaccagttcgcgctattcgccgtaagaagcaggcctcaatggttttagccgcccaagcggttaaagatggccaagcagatgcactcttctcattagggaacacaggggccttattagcagccgggttatttattatcggccgggtaaaaggaattgatcgtccaggcttaatgcccactttaccatcgattaattctgatcaaggttttaatatgttagacgttggtgccaatgctgaagctaagccagaacacttgcatcaatacggtttaatgggtaatttctatgctaaagacgtccggggcatcgaaaatccgcgaatcgcattgttgaataacgggacagaagcgactaagggtgacgaattgcataaggcaacgtaccaactcttagcggatgatccagatttgaactttgtcggaaacgttgaagctaatgatttgttaaaaggtgttgctgacgttgttgtgacagatggctttactggcaatgcgacgttaaaagcaatcgaaggcactgccacaatcgtcatgtcacaagtgaaacacgcgattatggatgctggggtcaaagaaaaaattggtggcctattattaaaagggagtgtcgggggtatcagagaaaaatttgatacatccatttatggcggggctgttttacttggcttgaaagcacccgttatcaaggcgcacggggctgccgatgcacgaacagtttactatacaattaaacaaatccacgcgatgttggctaatcaaacggttcaaaaagtcatcgattatttcagtgaccaagctgcgcaaaagaattctaattaaatagctagacaatgtctttcaaaggcgttacaatgactttcgcaggcataaaatcgattgcttgaaagaaacgtggaagttatgtataatcactggatacccaaaataattaggtgcgaaagtgtttcaatttggaggtttttaacatgagtgaacaagaaatctttgataagattgcagcaattattgctgaccgatttgaattgacccaagaccaggtcacaaatgaattgaactttaaagcagatcttgatgctgattcaattgatattgttgagttcgtcttagaattggaagacacgtttggtgccgagattccagatgaagaagctgaaaaaatcgcaacagtggcagatgccgttgcatacattaaagcgaagaccaaataaagtagtcaattggaccgtgataattcacggtctatttttttgagagtgtgctatcagttgggtatatcctgcggataacaaagagtggcgaatgattgcgcagcaatcgtttaacatgcgacgttaaacacaaggatatgactaatagcacacgtttagtataggaaggggagctaaaagtcacttttggctcccccttcctatttttttgcccccaaacaagacagaaaacttttcgaagttacaaaatagcgctatgattaaacttgtcaatcctttcagggttaagaatgaatgattgaaaatgagtattttcacataatgatcgttattatttatgagagattctaattttctaatcacgaacgtttgtaattcaactaaattaaattagaatattttaatctttattatttacttttcattttcaatcaggtatgattatttttaacaactgaagggagtgtccacatgagacgagaaaagggtttagtattaggtgtaacgacggtggcgataacattattattggcagcgtgtggttcctcaggtagcaagaatgcaggttcaacagatacggttagtttttcaacaaccgatgtgatttcaacgatggatcctgcattgaacaccgacgtgattggggcgcaggcgttaacggacacgatggaaggtctttaccgttatgaaggcaagaccattaaaccagcgattgcgacgaaagtggttaaaccaactaataatgggttaacatatactttcccattacgtaaagatgcaaaatggagtaacggcaaggctgtgacagcggaagatttcgtctatgcatggcgccgagttgttgatccaaaagttggctcacaatatgcttacatttatgaaggtattgaaaatgcagcagccatcacttcaggtaaacaacccgttagttcattgggggtagttgccaaagataaacacacattacaagttactttagaaaaaccaattccatacttcagtcaattaatgaccagttcaacattcttcccagtttatccagatgctgtaaagaaagccggtaagagttatgggacaaatgctaagacgttagtcttcaacggcccttacaagttatctggttggaacggcccagatagtgcttggaaagaagttaaaaatactaactactggaatgctaaagctgttaaagtgaaaactttgaaataccaagtggttaaagatccttcaactgctttgaacttattccaaagtaataagcttgatcgcacaaatatcagtggcgatactgctaaacaaatgaaaaatgatgctcattattcaacccaacaacaagcagctacgttctatatgcaagttaaccaagctaagaacccaatcttcaagaatgccaaggtcagacaagcaatctcaatgacgattaatcgtaaagaattggttaaccaagtattaggtgatggttctgcaccagtagcttcattaacaccaaaaggcatgagttttgaccccacgactaaaaaagatttcacaagtgaattaaatgccgagggcaagaaaaatacaacctataatcctaaagaagcaacgaagctttggaaggaagggctagctgaaaccggtcaaacgggtaagacgtttaactacacattattaggtgatgatacggatactgctaagaaacaagcggaatatcttcaagatacgcttgaaaagaacttacctggtttgaaggtaacccttgccaacgtaccatttaagacacgtttaacacgttcggataacggtgatttcgacatggttgtcagtgcttggaatgctgatttcccagacccaattacattcttagacttattcgtgactggtggtgacaacaataaaggtaagtggaataatcctgaattcgatgctcaaatcaaagcaagtaaaacagaaaatgccaataacgataaagcaagatggcaaaatctcatcaaagcccaagatattatgaataaagaatctggtgtcattccattgtatcaatcaggacgtgcctacctcactaacccaagtgttaagggattagattacggtccttctggaagttacaataatgtctcactttattttaaaaaataaactgactttataaaagatgggtttcggcgttgaaaaacaatgaagcccgtttttgttaggagcgaacttatgagtaaatatttgattaaacggattttttacctagtattaacgctattcattgtcgcttctgtgacgttcttcatgatgaaactgatgcctgggacgccatatacgaatcaacaaaagatgagcgctgatcaattaagaattatgaacgaacaatacggtttgaataagccgctgttccaacaatatattatttatctaggtggtttgttgcacggtgattttgggacgtctttccaatttaataatcaaccggttgccaacctcatcatgacgcgtttaggaccctcacttcaaatcggggcccaagcgatgcttttagggtccgttttaggagtcttattaggggcagtcgcggcaattcgcaagaatacttgggtggatggcgtggcgacgttcttttcaatcttagggatttcgattccgaacttcgtcttagccgtcttactccaatttttcttagcctttaaattacaaatgttcccaatcgccttatgggacggttggtcatcaagtatcctgccatcattagcgctagcagtagcgccattggctaatacagcccgcttcatgcggactgaaatggttgatgtcttaagtagtgattacatcgaattggctaaggccaaggggaactctaaatggcaaacagttgccaaacatgcgctccggaattcgatgattccggttgtgacgatcatcggtccaatggcggtcaacttaatgactggttcattggttgttgaaaatatcttctcaattcccggtattggggaacaatttgttaaatcaatcatgaccaatgattatccaaccatcatgggcttgacgattttctactcattcttattaaccgttattattttagtcgttgatattctatacgggattatcgatcctcgtattcgattaagcgacggtcagggggcacgttaaatggcagatgcgaagctaacagctggatcttttaaaccacttaataaagatacacatgaagaacaagaaaaaattagtgcaccctcattaacgtttatgcaagacgcaattcggcgtttgaagcaaaataaggtggcggtggtctcactattcgtactgttgatcatcatcatcgcagccgcattggcgcccgtgattgcaccgcacaatcccaatacgcaaaatgtggcgtatgccaacctcccacctaaaattggtgacggtcaactaccaggctttaagggtgagacggacgtctccggcgttaaagttgataaatatcaacaagctggtgtccctaaaggcaagtatttcattttaggcactgattacctcggccgggatttattctcacgaattctttatgggacacgtttatcactattaattggggtcctagcaacgctcgttgatttgttgattgggattccatacgggattatctccggttggcggggcggtcggattgatacgttcatgcaacggtttattgaaattatctcttcaattcccaacttaattgttgtggtgctgatgatgttaattttacgaccagggcttttatcaatcgtcattgcgatcggctttaccggctggattacgatggcccgactgattcgggcgcagaccttccaactgaaggaacaagaatttgtgctcgcggctagaacgttaggcgagacaccgttcaagatcgcgatgaaacatttaattcctaacttatcatcaacgattattattcaaacgatgtttaccattccgagtgcgatcttcttcgaagcattcttgagttttatcgggattgggattcccgcacctaacgcatcgctagggactttattatctgacgggcaaaaagcctttcgattcttaccctatcaaatgtggtacccagcagcagtcttatgtgtcatcatgattgccgtcaacttactagcagacggcctaagagacgcatttgatccaaaatcataaagtgcgtcaaaagcgattatatttcgaggattagcatagcaaggcgaatgattgctgcaagcaatcgtttgccttgtgtcgctaaccgcaggaatatgcttttgaaagcacgtttcaaaaagagtgtgtcattaacgatagcttttgagcatttgcatagagttgtgaatgagcgacatagtcggttgtttacaattcatagcaaagcgcagaaagctgttaatgaaagcacgtttcaaaaagagtgcgtttggaacggtttgactttgagcattaacttagtgttgtgaataatcggtatagccgattgtttgcaataggtcgttaagcgcagaagtcagtttcaataagcacgtttcaaattacgaaaaaagaccgttcgcggtctcatagttggaggtcgtcaaatggcaaatattttagaagttaatcatttaagtattgattttaagacctatgcaggtgacgtccacgcaattcgggatgttagttttaaccttaaaaaaggggaaacgctagccattgttggcgaatctggatcaggtaaatcggtaaccgtgcgtagcgttatggggttgctggccagtaacgcccacgttaaagccgggaccgtcatctatcatggcgatgatttattgaaaaaaccagaacgtgaaatggatgcgattcgcgggagcgacatctcgatgatcttccaagatccgatgacctcgcttgatccaaccatgacaatcggcaagcaagtggcggaacccttattggttcacaaaacgatgaacaaagaagatgcgatgaagcgggcccaaaccgtgttagaattagtcggcattccgaacgccaaagaacggatgaaagattatccgcaccaattttctggtgggcagcggcaacggattgtgattgcgattgcgattgttgattatccgcaaatcttgattgcggatgaaccaacaactgccttggatgtaacagtgcaagcgcaaattatcgacttgatgaaagaactacaacgtaaaattgaaacgtcaatcatctttatcacccatgatttaggcgttgtggccgggattgcggatcgagtagcggtgatgtatgccggcaagattatcgaatacggtttggtggacgaagtcttttatgaacccaaacatccgtatacttggggcttattaaattcgatgcctacactcgaaacggcgggtaagttagaggcgattcctgggacgccaccagatttgttggatccacctaaaggggatgcttttgcacctcggaatccgtacgcactgcaaatcgatgtggaagaagaaccaccattctttgaagtttccaaaacgcattttgcggcaacctggttattgcatccagatgcaccagcggttgaaccgcccgcagcaatccaagctttgatgaaaaaacataacgttctttaaattataaataagaaagtaggcctgtcagatggataaacagcaacgtaaagtcttagttgaagtcaaacatttaaaacaatactttaacccgggcaaaaaatccgaagtgaaggccatcgatgatatttccttcgagatttacgaaggtgaaacattcgggttagttggcgagtctggttcgggtaaaagtacgactggtcgcagtattatccggctttacagcccaactagtggtgaaattaattttgatgggcaagatatcagtaaaatcaaggaacacagtcgccagatgaaagaattccgcaaagaaattcaaatgattttccaagatccatacgcatcgcttaatccgcggatgaaggtcaaagatatcattgctgaaggattgcacattcatcatttggtcaaaaatgaagccgaaagtgatgcgcgcgtcaatgaattgctcgatttagtcggactcaataaggatcacgcaacgcgttatccgcatgaattctctggcgggcaacggcaacggattggaattgcccgcgctttagccgtcaaacccaaatttatcattgctgatgaaccaatctcagctttggatgtgtcgattcaggcgcaagttgtcaacttgatgaaagagattcaggaacaacaaaacctcacgtatctctttatcgcccatgatttatcgatggtgaaatacattagtgatcgcatcgccgttatgcacaacggtaagattatggaattggcatcagcggacgatatttacgatcgcccactccatccgtatacgcaaagcttattatcggctgtgccgttgcctgatcctaagattgagcgccaacgtcgccggatgccttacgatagttcaattgaaagtgacgatggtgatcgccaattacgagaagtcgcgcctgaacactatgtttatgcgactgaagcggaagttgcgtcttaccaatcagctttagcgacacttgtgcaacaagctaattaaatgagaaacgtctattttgaaatatttgtttgcgtgttaaaataaatatttcagaacagacgtttttttttatgcgcctttaattcggaataccggcgttcggcgctgtttttttagccgtataaacggtataatagtgaaagattaatcagttgaaatggggtatttaattttggatgcagcactagtcagcgagcttcgcgcccgttatggtattgaatttaataatttagcacttttggacgaagcgttcacacattcgtcttacgttaatgaacatcgcgagttaggcttgcgggacaatgaacggttggaatttcttggcgatgccgttatggaaattacggtctcagaatacctctacaaaaagtatcctgactggccagaaggtaagttaacacgtttacgagcagcaattgtctgcacgaagagtttcagtagcttttcaaaagaagctcattttgaccgttacattcgcttagggaaaggtgaagagaaaaatggggcccgcgcccgggcgacacttttggaagatttatttgaagccttcaatggcgctttgttcttagaccaaggtcgcggcgctgtcgttgattttgtttcacaagtcatttttcccaagattgaagccggtgaattctcagatcaaacagattacaaaacgaacttacaagaattcttacaacaagatggcgaaatcgaaatcgactatcaattgttagcggaagttggcccttcacatgaccgtcaatttgaagtggatgtgttagttggcgatcgggtattaggctctggtgtgggtcgcaataagaaagctgccgaacaagcagcggctaaaaaagcgttggaacaacttaaagcataattgcgattatcaagttagtgtagggagtttagtgcatgcagttaaaatcattagtcttatcaggctttaaatcatttgctgataagacagaaattaatttttcagacggcttaaccggcattgtcggcccgaacgggagcggtaagagtaatatcacagaagcaattcgttgggcgatgggcgaacaatcggccaagagcttgcgtggcgaaaagatgcccgatattatttttgccggtactgatttacggcctcagatgaaccgcgccgaagtcacgttgaatttcgataatagtgaccactatttaaatcaagaactagataatgtgacgttaacgcgtcgcctatttcgtaacggtgatagtgagttttatttaaatcaaaaaagttgtcgattaaaggatatcgtcaacttatttatggattctggcttagggcgagaatctttttcaattatttcgcaaggtcgggttgaagccatctttaacagtaaacctgaggatcggcgcaatattattgaagaagctgccggtgttttaaaatataaacaacaaaagaaaaaggcccaatcagaattagatcaaaccgatgaaaatttaagtcggattgccgatattgtttacgaactaaaggggcaagttgaaccgcttaaagaacaaagcagtattgcacaagattatttggaacaaaaagcgcaatttaacgccttacatcagcaattattggtcgttgaaattgatcaattagcagcagatcaaacccaatatcaagcccaagccaagacactcgctaaggcactaggcgagattgaaagtgagattcaagaaaccaatacggcgttggccgataatcaacaggaagtcgcaacgttggatcaagaaattgaaacggccaatgaaaccttgttggttaagagtcgcttggctgaaaatttacagggccaagaaaatgtttctaaggaacgggctagctatactgatgctaatcgccaaaacttggtcgatcgaatcgcccaattagaaacgcagtcaacaacggctaagcagcaacaaatcgcacttaaggcaacgtacacagaaaaagtcgcaacactaactaacttgaaaaatgagttagcgaccttgaaacgacaagcatcaggtagtgaggccgaattaaaggcgaagattgaacaaatccgccaagactacatcgatcaaatgcaagcccaaacaaccaatcgcaacgaacaacaatatctagaaaaagccttgctacaaacgaagacacaattaacgcgccaagatagctcaatcaatgaaaccagtgcgcaattgacacagatgcaagctgacaaggcggccaaagaagcacaagttgcccaattagcaacagactacgcggctttagaaacgcaactaagtcaattacaacaacaaatcagtgcgacacaaaagcaatatcaaacggaacaaaataattggttccaagcctctggcattttacaaaaggcaaaagccaaacaagccagtttagctgaattaaacgatgattacgccggcttttatcaaggtgtcaaagcggtcttgaagcaaaaacaacaattacctggtttactgggtgcggttgctgaattaatgacggtacctaacgactatcaacaagcgattgaattagcattaggggcacaattacaacaaattgttacgacagatgaaaagacggcgcaacaagcaatcgattatttgaaacgtaatcgactgggtcgggccacctttttaccgaataatgtcgtgaaaccgcggactttaccaagcagtttggtgaaccaactacaaacagaacctggttttatcgggatcgcgagcgatttaattcagttcgacgatgctgttagcccagtcatgatgcatttgatggggaatttaattatcgccactgaattgacagaagcaattaagattggccgtctgacaggacatcggtaccgaattgtcactttagcaggtgatattttaagtccagggggttcaatgactgggggacataataatcgccaaaataatggtggtttattggctcggaagcaaacattaactgatttggaacaacaaattagtaaaatgcaattggccttggaccaaaagcaaaccaaggtacaaactttacaccaagatttggcagagcaacaggcgcaactcgaacaacaacaaggcgcctttgaaacagctaagacgcattaccaaacacaaaaaaatgagttgacgttattaaacgaacgtcttacgcaattcgaacgccaacaacaagcgaccgattatcaagtccaacaacaacaacaaagttacgacgtggacttgaaacgccaaggcgaattacaagcagcagctaccgagattgaagcacaactcacgcagttaaaagcggacttgggtgcggccaatgaacaactacaacattttgatcaaagccaagaacagattcgccaactacaaaccgctttggaaacgaagttggcagttgcgcagtccgaacaaaaaaatgtacaagaaaagctcaccgatgccacgcaattggctaacgatttaaagcaacaacttgagacaagccaacaagcgctcgccgcattgcaacaagctgattctgaagatgcgatgacgcaaaaagaacggcggacgcaactgaaggccactaaagcactgatccaaaaacttacagccgaattggcaacaaaacggacggcacgagaaacgctgaaggccacgcaacaaacgttacaagctaacgcaacgcgtgtctaccaattgcaacggaattctttagctgagcaagaacaaaacgcggttgctttaaaccgtgttaagattaatattgaccaacgcttaacgacattgcgcgaagattatcagttgagttatgaagcggctaaatcggatttacaagcttccgatttaacgaatgaccaattgaaatcaaaactcaaacttttgaaattaggcttagctgatttagggactgtcaatttagcggctattgaggattatcaacgggttaaggaacgttacgatttcttaatgcaacaagatgccgatttattggatgccaagtcacaattattagcgtcaatggctgaaatggatgcagaagttgaaaaacgcttcaagcaaactttcgaccaaaccgcagcggcctttgaagaaatcttcccaatgatgtttggtggtgggcacgcgtcattaaccttgacggacccatctgctttattaaccagtgggattgatatcattgcacaaccacctggcaaaaaactacaacgccttagcctgttatcaggtggcgagcgcgcattaacggcgattacgttgttatttgccattttaaaagtgcggcccgtaccgttttgtattttggacgaagtggaagcgtcattggatgaagccaatgtcgatcgcttcggtcgttttatgaaacgctatgagagtgagacgcaatttatcgttattacgcatcgcaagggcaccatgacccaagccaaccggttatacggcgtaacaatggcagaatcaggcatctcgaagatcgtatccgtctcgttagaagaacacgaaaccgcctaggaggtaagacatgggattatttgatcgcattaaaaaagcattcacgctagaaccagaaaaagaaccggaaaaagtcgacgaacaagcaacgactgctgaaaaggaagctgacgatccagctgaaaaatcgacagaaaagcttgacgattcaaccggcgagaccgattctggagaaacaccagaaacaccagaaacaccagaaacaccagaaacaccagaaacaccagaaacaccataattaataacaatatatggtattttttctgaatctaatgttttcccatcatctttatagaaactatcagaaaagtgaaactgaatattcatgtgcttagctttttcataattctctgttaatctatttcgatcaatcgaaaccgcaacaatcggcttcttaccatccacttctgcagtatatggcttagtttttcctcttgtttcggcactcacagttggatcatccgctttagcaacaatattgataatcacatctgtaacctcaggccacggatcagtaatatagaacggattagatactggtctcgatactttattctcattattaattggatttgtttgttttaaatccataatttcatccgtactagaccaaaaatcagtattttctgggagtaagttagcataaaattgactcacatcctgaatattctgctgtaaactataatctgttgctgttgaacccccacttgtttcgtacttattaatcccattatcaacatactgtggtagtttagctaaattaccgtttataccttctaccattttattcttccaaagaccttcaaaagtcccttgttgccctttgctaaaaccagcaagcgaaaccgacattccagggtatgctgcttcagcatcggctttcgatgtatcagttgcaaactcagtatttttagaaataccatcttcaactagcggattttgccacataccacctaaatgaaaaactaaatttttcattccttcagttttatcatatattttttcattcccttttgtgaaatcattaataatgactgctggattttttaaattcttaaaatagttatcatatgctgtattcgtactcgattcagttgaaccgttaaatcctgatggaccaatccactgcttcttcaaaataactgaattcgccataattcgaccactgaatggagattcagattgaacaaactgattccccgcgaccatcataaaatttgaggcgccacttaatggatattccgtatcaattcgcgacttattcttaatcaccgtcccagttgcctgaactttttgctgattcacaaaacttatcgttgcaaaacaaccaattactaacgcgattaaaccatattttctttttgtcatatatgttggcccccagtcctaacttccccattaagcgctagaaggcacccccgagttattgtttttctagttctttgatttgcttttcatcttgcttcttacgacgacgataccctaagtaatacgttgtaattaataggatgatgaaaataataattagtataatgattaaccaaatccaccatagatttttattctttcggttcatttgcattgcttggttgacactgatttcaaaatcacgatcgaaaacccaagttttttgactggatttcgcaactaaatgcaagtgatacttcccatgattaatccagctatcaccaagcggaatcccatattcaaagctagagtttgtcgccatcgtgataccctcacgttgatagccaaatagtgtcttagagcctttatgtttcgagcctttatgtttcgacactttagcattgatagtcatcgcacctggtgttgctgctcgtacattttccaacttagctaatacggcaggctcatgcagatagtttgtttcactaacccgaatccgccgcagtttcagatttgccggtgtatgtatattaggatgttctcttaacactacacctatcgccattgcataataattttttacactaaaaccttgttggtctgttccttgcgtactacctgcctttgtatctttaaaatacagcgcaccctttagaacgcctgcatagagttgatctggcatctttaccttaaaattaactgtttttgtttctttaggtttcaaagtaatcatttgtggttgatcaaaaagctgactaaattgatattccgcctgtgataatttcccagggttatgcttatcaaaggcctctgttcctgaatcagttgtataaccagtattagctgcggcgctaatcttttttgtattatcttctagattttcaatcaccactgataatgtttcggtttgatttggcttcataactaaatcaaaactagataaagcctcgttatattgattatcgggaatattagcaattactgtaaagccagcaccggctgcctggaccgtttgcatatccataatcaatggtagcaagaataatcctattaatgacaacattagtatgtgtaattttttcatgcgctctccttcacgaaaaaaagttgggtttccccaacttttttctgatctaatctttaaaatttgataattaagctgttggtaaagttgtttgagcaccatccattaaagtccatgtgataggtgcttgataagttcctgccacaatgttctttaattcgctcaatttaagtgaagataccttatcatcagtagtactaaaatcagcagttgttgtttgagcacctaatttttctggtgtgttttcaagggtcttggcggtattcatgatgacttgtgcatctttaccaatggttgtagtcgttagattatcaacacctttaccaattgtgataacaccggttgcagtcccttcgctctttgtatcgatattcttaaattcaccaagttgtgcgaataatgtccattcactaccagcaccacgataatcactcacttgtaacgtattaacatccttatcaatattaccttgcgtaccgtctgctggtgtagcagtttgtgcatggccatcattatgatgagtgctatcaacagtgttgcttgtttgtaggaggtcatcgttctttaagttattgatagttgttgtatcatcattaccaaaatggaaatcaggtgcagcatccaatgtcaattggccagccttaaccgtaaattcagcagtcgttgttgcttttgctagtgttgctttagtagctaccttatcactaactgttacggcttgtacgcctgcaacgttgatcaatgttgcgcttgctaatgtaactgctgctaataatgcgaattttgtttgtttcattatgaaattccctcaaatagttagttatttaatagtaattaaccctattattcatttacttctttaaggttattctaggtcataaatcctgaaaagacaagtttctcagctattgttaacctcgtaaagcgcttatcaaattaatagctaaaaaatattgaatagctgctttatttgacgctgttcactatattcaaaattatgtactacgcgtgcatacggttctcaaaatgccgattattcaactttataactgttaatatgcttgagtagctgctggtaaactaacatatttacttattgcaaaaattacataaccactaatatcaacattattattttatttttttgaacccaaattaagcactagcctttcaaaccctttagagacactaacatatctgttatctattcttaaaattttctcactattatgactgttattttattatattacccattcaaatcattgaccttgctaacattagctgacaataattttattaaaaaattttagaaaaaatttttcaactttttttcgaatagatattcaactaggtaaacttttattatactagcattatttttttaacacttattggactgtaccactcctgtaacccgtcaattgtgagaacaatccttttaaagtcccatttgattcagtatactggtagataacagctattcttgggggtacttcaaatgcgaatatggcaaaagactatcattattatcctagcacttatcgcaataccgattatttattttgagaaccagtactttagccatcaacaaaaagaggctcaaattaaaacaagccaaacagcgatcttcaaagcttaccgaatccattccgaaaataattatgccaatttcgccatctacactgatacaaaatcggcaggaaaaatctactattttgtccccaaaaaccaacaaggccacgccattgatctacggcggcaacaacagcgcattggcgaacaactctatcaaaaggcactcaagcagaaacaaaaagatattgttgtttacatcacctacaatggcgacaacttgcacgatgatacctactgcttaacaccgactggggcagtctacagccgtgtcgaacatcatttcagcactaaattcggtaaattcaccgatcaattgggacaagaagcggtttataacctcgctaaccaaacacaccccgtgacctttaaagacttatatcatgatgccgctaccctaccaatgattaaacaactcgctgttgatcaacaacttaaaaaatacaactacacgccccaccaattaaaaaccttggagaatcttgattttccaactgacgtcaattatcaacagttctctttttcacagcacgggttaacgctaaacttttcaaaaaacacgctgggaatcaaacagatcacattgccactagcgacaatcggtccttatctaaatcccgactatatcgctgaaggctacacaatgccaagcgccaagaagaaatccaaatcagttgccctcactttcaatacggctcttgatacggacagtgccaagcaagtccttgaaattctcaatgaaaaagcggcacaggccacgttcttccccaccggtgaagcagcccacaaacatcctaaaacactcaaaaaaataagcgcggctaatcaagcaattggtaatcaaagttacgctgccgatgatgcaatcgatacaatgagtgaagctgacttatcagcaaatcttgccaaaacagatcaagcgattttcaaagcaactggcgcactaccacgattcatgcgcgtaacccctgataccaccaataaggccattgcgagtgccagccaacgcgcgttgattagttggtcggttgactcagaagattggcgcactgatattaaagctactgatattaccaaaaacgttattgagcgcacaactggcggtgacgtcattctacttagaactgcgcctgaaacaatcaaagctttgccagctctcatcgatcaattgcgagccaaaggttatcacttagtaacaattccatcattatttgaacaccgtctagcacctttccaacagtacgctaaggccgctgatccttatcaagattaaaaaaaagaaccccgagacggctgtctcggggttcttttttttaatcagtattatcgacaactttatcagccgttgataattcccaagttgcttccaacttatatttgcctgggcgtttagcacattgatctaccttgccattatggaatttcaagttaacgtcgctcttataaaaaggcattgacttggccggttgtatggcgtctaactgctcatctcccgacaactgtttttgtgtatccagtgttaacaatggggtttctggtccttttaataaaccacctaaatttaaaatctggcccgcttcccaattatcatccgtccccgttttcaacgagtacaattggatgttaaagtcggtcgcatcctcttgcaacaatggattatcgacgagatccgcacctgaagtgctgttcttaacaactaatttccagtccatataaaatggattttcaacgttaatttgccccttagcaatgctgaccggttcttgttcaaaggtgcctagtgtataggtcccaaaatcaaatacctttggatagttaaccaacaaatcaccatgaacattcaaggtgtaattagtaattgtattagcatactttgccttaatttcactagccacaataaacgaaaatttattcttatgcagtaaatgccaaccgataaaggccttttcgacgccattaaccacataattattctttacttgctctacaaactacgtcaaaaaacaaaagaacaataataatgaaaaggcgccgagacagttgtctcggcgccttttttattatctaacgatgtttactaaggtctactttttctaatggaataacctttgttttatagcgaatcttgtaataactgtacaaaatgatgaacaacggaatactcatgtaactaatcccgatcgctgtccaatcaaagtgggcaaacgcttgaatatcctggccaataatgacaatcacacagagtaagaaagcaaaaattggcccaaatgggaaccaccgtgcgtggtatttcaattctgacaattgatgaccttgcactttaaaagcgcgtcggaaacgataatgcgaaatcgcgatccctaaccaagcgatgaaaccagtcaaaccactagcagccacaaggaaaagataaatgcgagtgccaaagacactggtcataaaggtcaaagccccaataatcgttgtcccgatcaaagccatgactggaataccacgtttgtttgtcttggcaaaaatcttagcggcatagccgtcttcggccattgaccacaacattcttgaagaagcatacatccctgaattagcagccgataacactgacgttaaaataactgcgttcataatgctggcagctgatgctaaaccagcacgtttgaagaccaaggtaaagggactaaccgcaatgttggtttcactagcacctaataatgaggggcttgtataaggaattaaacaagcgataacgaagattgataagatgtagaataataaaattcgccagaaaacttgtttgattgcctttgggatactcttttcaggcgtcttcgattccccagcggtgatcccaattaattctgtcccttggaatgagaaaccagcaacaacgaacacactcaacatcattggtaagccaccaacaaatggcgctttcttgatagtaaagttgctaaggccggtccgatgaccacccataataccaaaaatcgttaagacaccaacacctaagaaaataataactgtaataactttgattaatgcaaaccaatattcagtttcaccaaaagatttcacactcgtgatattaatcaagaaaatcaataatagcgcgactaaactaaaaatccagcccggcatatccggtaaccaaaactgcatgactaaggctgcggtactgacgtctacggctaacgtaatcgcccaattaaaccagtaattccaaccaagcgcaaaccctaatgctggatcaacaaaccgcgttgcatacgttgaaaacgaccctgaaactggcaagtaagttgccatttcacccaaactggtcatcaagaagaaaaccataatcccaatgccacaataagcaagtaacgcgccacctggacccgccttggcaattgccgacccacttgtgacgaataaacctgtaccgatactaccacccaacgcaatcatcgatagatgccgcgtctttaactcccgcttcatttcattttctgccatactacttccgctcttttctccattatttcaagaaaatcgcaccaacccgcgaatttagcaaacaaaaaagccttcttgtctgctaaaaacgacaaaaagactataagccttatattaaccgttgatagcgccccgtaacgtttcgttacgacagtccttgatttattcaatcaagtcccaacatcaatttgaataagcaaattgacatttcggcaaattcccctttaattattcctcatcactgcttagtcagttcagaataacgactgatggtttttgcgacctcttatcttgttagaggtagtatatcgaattaaagcgcatccgtcaacattgggcgcaatgcaaatttcagctaaaaaaagaagatcgcctactggcaatctttccattttaattattattcttcagtcttgtcttgcttatttttccgccataataggaagagtaagaacaagattaagagtaccatgacaccgataatcacgtataaccaccagttactttgtggtaattcaacagctttaccgttgtattttctggcttctttttgtgtgatttcaaaaatccttcgacaatagccactgacccttgttcgagttgactttaatcttaatattataacgaccagccttcagtggttggttttttaaatcaatcccgtaatcaaaattcgagttgggtgccatctgtaaatcagtttgcttgctgtgataaagcaccttactttgtccagcacggcgaatcttagcgtcgacttgcatctcaccaactgagtttgcttttgtattttgaatatttgataaaatcgcagtgtgcccgttcaacaagccaggtttaatccgatttaaccgcaaatgtggtttcacagtttgatcggattgcgttaacttaacgcctaagatataagaatagcggttcgtcaaagacgtgcccttcttatgatctaaagcttgttcaacttgatcttgcttaacttgtgagacataaaacccgcctaaaatggtaccttcaaaagtcgctttaggtgcattcaaggtaaaagttgctgtccgactactttcagcaggcaccttcaagcgttgcgctggcgacatcaatttagtaaatgggtattttaacgttttatcgtacttaggatcggattgactgtaatcaatcaccccattttgattggtaattgccgtatttggtgcgacatctacttcaaggtcttttttcccagtattttggacgacgaccgatacttcctctttttgaccaggtttcacgcccaaatcgtaatagcctaaattcttatccgtttgattttccggataaatcggtgcaactgagtaagttaccttttcggcatgaacaacctgttgattgacagtaaatgccacaaacaacgttgccagcacgcccatcactaatccaagccattttttaaagtgtgtcattttctaatctcctctatcttaaggggccggtgtattacctaatgtccaatcaatggtccctgtgtaatcacccgcataggccccagcattcacttttaacaatatcccttgattatcatcccacttaatcagcgtaatgtcatcatctgatgttgttgttttagaagcaattctttgagggatttcggtgacgtctgttgatttttgaccatcaacataaactagaccaccatctaactgtttgtgatctgtcgtccgtgtcaagcctgttgagctggcatataaatcccaccgcgaaccggtaccacgtgtatcagccacggttggtgcccaatcagtattatcacgtttattaatcgtatttttgccaaccgttactggcgcaaatccaatttcatttttaaccttatctaatagaagggtaccaccttttagtttaaagtagattgtcattactgtcgatttttcgttgtacccagcgttggtcatataaagcgttaatttatgggtgtcgttcaacgataaaccaaccgtcggaatcccactgactaacttaggaccgacattattttgcgcgatggtcttttctgcaccatcgtcaattgcataatgtaatgtcccaagcgcgtgactatcaatcttaccagtcgctgatgattgtgaccaagagcctgttaaagcaattggttgattcttatcaagcgcaattggtttttcctttgttgggtcagtccactttttatctaagacaagcttagggagacttgtgacgtaaacggccttttctgtcgattcacgggccatcttaccatctaaactgatttcatagttccgacctaaattggtcgtcccatcagttggggttgggtcaaaagcggttagcgtaaactgaatcttagacgtgctatttttggtaacgtcacccatattaaccccagtactaaaggtatttttccctatcgtaccaaagaagtcattttctgtcgcatcgtgcggtgtcagtgtattaccgttcaaatcaatagaaggtgttttgaaaagacccgtcgacaccttattcttcgatactaatttattattgatcatcaaatcatcggcaacataggagaccccctgagaagtatccgttccatcagtcttatagcgtacacccacttgtttccaatcagaaccactagtggggtcgttattaattgttagaaccccttttaactcttctagcggtttcgccggattgtccttcgttacttcagcaccaagggcattcccatttttatggtacactttgtaattttgtgacgtaatcggaatattcgatattttttttaaaagccacttggttcaattcgttactcttaccagttttacccgtgaaaccccagtaaacttgcgttgttccaaaaatattattgacaataattggtaccttaacggggtcttgaccatcaaatttataggtcaaagtatgatcggcataactccacttgacattaaactcatgccatttaccatctgatccaggaaattccttaacatcattatgaatcaaacgaattttagaacctattatcccgaaatctttataactactggttaaagccggataattccatgcgatatgatttctaactagtggtttactcgtacccaaaatacctgtcggtgctgaaccccaatcatcattatgtcttgtatcaaactctactgcaaaactcttcttaatagctggactaacatccacactacttgcactaccccagacacctaactgctgccctgttccgcctgtttgaattgtattgtaaccacgtggatcagcatgcatcacaaaagccatcccgtcagctgcattactgccactatccccaaagtttaagagcatcgtcgcctcaaaatccttgcttaaatcaatcctgttatccggattagaccaaatagcccccgactgatcgttggcggctggattgatgacagttacaccatcaacaggtaattcactgtcggattcctttagtggtggtgcgaataaattctcaatatttgtaatatgcgctggtactgggtcaattgctgcctttgttgggttaactaccaccaagattcctagcaataaactaatacctagcactaaaaattgtattgttttattaatacgcattgccagtcctccttgagcagcttttctcaaacgactaattaactgttacctcaagtgatttcgactgggaaatcaactgaggtaacagctcattattgagctgttactactattataaccattgtaaaatgctatctcaaattaagggttaattatgcttttggtgttgcggttaatgtccatgttaattgaccagtatagtcaccagcgtatgcgccagctaaaacatggagatttgaaccactaatcttgtagttccagttccctaacccttgatccttaccagctgtgataatatttttagcactatcattcgttaaatcaactgattttgtatccgctacagtgtgcgctgcgttatcagtactgataccactcgcattcttcaatgttaatgttgagttttcaagtgtgtgactgcttgcatctgtgaacggtgttgtaagcgcaacgtcaactgtataaccagcaccagtcccacgcgcatcagcaaccgaaacagtgccatcagctgtttgacccaaatctaatacagaggctgtaatttctttagtgccaaaatctaaatcaggaacagctgttaatttaaccgtatcgctacccgttaattttgcttttacgacagaagtgactttttgaccatctgttgcgatttcatttttaggagcatctgctgcgaaagccgtttgccctgaaatcattgctgcacctgctactgtcactaaaccgcttaataataatgtactaatcttcatcacaaagacctctattctttaatttttcttttatcatctaattaacatcatcaaaaaattcagcgttctcaccatctaacccattgaagggtaacgctattaaccttttcgggattagtatatcacccccgtaatcgattgtaaacaacttattttcaaaaacatttaataatataatcatttattaaataaagtataagtaatatccactatctaaaaattagtgaaaatcagaaatgcttatatatcaacaaccgtcacctgattagtgaaaattaattttcattattttttgtaatttcagcaaataataatattttattttaaaataattggacaatcgagctaatctcagcaactcaaatcactaaattttctgttaaaaagacaaaaaaacaggctagaagaagggttcttctagcctgttttaacttagtaagtcagtttactttagatttttaataatcttttgaattaataattcacgttgttcagccgattggttccaatcaataaccggaatatcgggatgccccatcgtttcgataattaaaccggagacagtttgttttttcaattcattggcccacaacatgtccgctttatgaaaagcagcattaataatcaatgtcccttgtttagccactggttgaaaatcattaaagactgtatctaacttaccggtatctggatacgacttaatctgaccttcagttgccaagacaacatcgtaaattgatacttcactggcaggtcttgctagggtaaagccaccactattccctgaaacagattttacaagaccggccactactaacttacgaataattttccgtaagtaagtttgtgaaccacccagacgatgatgaatcacttctgacgaaatcgtatgttcaggatcttgggttgccaataacacaataatgcacgttgcttgttcaaatgctcgtgtcagttgcatattagtctatctccttttaacaaacgtccctgaagcctcacctggggccgcttttacttcaaatccatatttagttaaaatgtgttcgactttgttgaaactctcgcgatcaaacgtactgatattgccatcgattgtttcaatttctaatttgttggctaagttacaaaaggccttaactgccaattgcgccaatcctaagttttggtaatcataaactgctaagcgtgaagctgcacccaatgtttctaaaacagtgatgtgcatttcatttttccatttgttggtttcaaacaagagttgtgcttgaaaatcaactattgaatgtccaaatttatcaacattcgcatatggtgtatacacaaaaattgagttcgttgattctcgctgaccaccttcacgatagtccgtatagacaacatactgtttaaccccatcatcgctggtttgattcatgctagataaaattgttaactttgaatctgcctcaatttgcgctaattttcttgcaaaggcttgatcattttcacttgccatctgataacccccatttgtctttcaatcccgattataccacaggttttccaatttaaccgcgctttttaaagggttctcatttcaattgtgatttttttatcgaaatcctttttcgcctaaattatattggtaatattgcactaactcaccccctaaatagtcaggaagctgcgtttgataagcagtggtaaagcccactttttgtaaacaacgagctgatttttgattggtaataaaacaagccgccataaacttcgtaatatgcaggtcatcatgataagcattcataaccgcagataatgagcttgtcatcaggccctgtcgctggtattgcggcaaaatcgcaaaacttagttcgtacgattcaacagtgacatcatcttgcactaggtttggtgccaacatcattagcccacaaaccgcatctgcctttttagacacaattgcccatgaatgttcatcagactggagcatcgtcaaaaaagattgcgcttcatgctcagattgaaacggcggcatattgagttgcttcgcaatttctttttcgcaaccaatttggtagaccactgctaaatcgctagcgataaaatgtcttaattgtacggcttctgtttgaatattcaaccgatcctctccttttgaaattcctaccttttataatacgttacttacttgtttccgccaagccgttttttatatttgtcttaagaacaagcatattaattgtggtagaccactaaatattttataattgtagccatcaattcctattgttagaaagatggtgttcgtatggcgttacgtgattactttcatttattctcaaccgttccagaacaatcagaatcttacgattacatccttcattttctagggacgaccattccggatttgcgcgattatcccgatttaaccaaaatttgtgattgggctgcttacgacgatcacagttttagaatctggaccagtttacctttggatgaattcgaacaaaaattggcgcaattaacaccgctaaacgaaagagattaccaaattgattacagctataattttaaggatattaatttcttctaaaatttacgcttgacttttagtcgttcctgccgtaaattgattaacaatcatacaagtcatctcattcaaaccaagtaatgctttatctgtgtgtcaggaagtcggtggttgctgcgaaccgaccagggtaaatgtcgtgaaatactgaatgaagacttcggctaattaacaggaccgttatcccctgtaagagtggcgtgttggcttaaattggcgcgctaactgggtggtaccgcggtttccaatcgtccctattcgcagatgcgagtagggactttttttatgcaaaatactattgaaaaccactttcaatagcacgtttcaactaattttaactaaagggaggttttttcatgttaaagcatcttgcatgtggtggtattcttcgttatcagtcctatgacgcacaacttcagataaaacttaaaaaggatgcgttaatatgtcaaaaaaatcaattagtctattcgaagcaacactagttctcgtgattctcctagccattatggggaccggcgttattattttccaactttctcctcaaaccccggtcctcactgggattgccctgctgatgttatgggcgcggtggcggcattttagttggggtacgattcatgaaggaattgaggaaggcttaaaaagtggtctaattcccatcattattttcattctcgtcggtgccttgatcagtacttggattgccgctggtgtcattcccagtttaatggtttggggcttccagatggtcaatgtccactggtttattccatccattttcgtcgtttgtgccctcgtggggagtgccattgggagtgcctttaccgttatttcaacagtcgggattgcctttttcggcattggtgccacactgggattagataccacgatcgtcgcagctgccattatttccggggcaatatttggtgataaatcttcacccctctctcaatcaactaatttaacggctgccgttactgaaacagatctctttgcccacatcaaaaacttaatgtggacaaccgtaccagcttttgtcggttcattagtgctatacgcgattatcgggcatacatctcgtgatattccattgaccaaaatcagtacaacagttgccattttaaaggcgcataccgacgttagtctctgggccttactacccattattttaatttttgtctgtgcgcgttttaaaatgccagccattccaacgttatttttaaacatcgccgtttcgatcggtttaatttttagccatcatccccacacttcttttaaaacaattgccaacttgattgaaaatggcttcgtcgctcatactggcaatcaaagtatcgatgcacttctcacacgtggcggtattaatagcatgttgagcacagtggccttaattatcatgacgttgaccctaggtggtctattgatgaaactcggtttaatccaacgcgtgatggcaccccttgcaactcgcctcaaaactcctggtcaattgatcagcgcggtaattgcttctgggattggcgttaacctctttatcggtgaagaattcctttctgttatcctgccaggtaaagcttttaaatcaacgtttgaaaaatcagatcttagcaacttggcgcttggtcgtgcacttgaagatggcgggaccgtcattaactacttagtcccttggggcgttgccggcgttttcgccgctaacacactcggcgtgccaacactaagctacctgccattttgtttcttcagtatcctctcaccaatcttctcaatcttgagtggctttacaggtattggacttaaaaagaaaagtgttattaattaagcaaaataaaagaggttgcgacaaaagtaatttttgtcgcaacctctttttttgtattcaaaattttatacctaaaacgtgctttttgaaactgccttctgcgcttagcgtctctcgtcaaacaactgctgacagcagttatccgccgagttatgctaatgctcaaagccaaaccgtttcaaacacactctttttcaaacgtgctctttcaggtatattgttgcagttagcaacgccccgcaaacaatcgactgcgtcgcttattcacgtgcctaggctaagccgctacaatataaccacctgaaacgcactctttttagaaaagattcatcaagaattgcccgccgtaaactagtgcaaagctataggctgcaattgatgctggtttgcataagatgataatccatgtgaattttttaaatgacatttcggttaagccagccattaaacataagacatcatcgggcgcaactggtaggaaaatcgctaaggcgaaaaagcgcgcaaagtttttcttttccgtaatcgtaccgatatatttatcataagttttctcgttgatgacgtggagaataaatggtttcccaaactggcgcgccagcaggaaattaaaaattgacccaatcgcaatcccgacatagttatagataaagccccataacgggccaaaaactagaacacctgcggcggtactaatcccgcccggaatcaccggaatcacaacctggataatctgaatcgtgatgaaaataatcgggccgatgagtacggagtggcccaagtacgcttgtaaggctgttgtgttgttaaaaagccctagtcgtgaccagtaaatggctaatgcaatgctcccaattagggccatcagagaagtcgtactaattaaacgtcttgaaattgttctgctcatccgccgaattcctttccctcgataatgtatctttaatttaccacaatttaaattccgagtagtccgccgatagtctgatttaagaaatcttaactttttagtcgctcatcctaaaaatgtccgaaaaggttttaatccttgtgcgcgatatttttcaacaaactgagcaactgccttaggatcctgagtttgatcatcgattaccaattgttccactggcaatggccgttcgttagcaattttgacatcaatcacaactggtccttggcgtttttgagctgctgcaaaagcagccttcaattcatctaacgtccggactgtaaagccttgggcccctaatgctgttgcggcggcaccgtaatctgcaccctgaatggcaacaccagaatgtggttgtcccttgtcatcttgttctgcttcaataaagccaaatgaatcattactcaacacaacgttgataattggcatttggtatttaacttgcgtaatcaaatcttgcatcaccatcgtgaagccaccgtcaccactgattgaccaaacttgccgattagggaaggctgcttgcgttccgattgcagctggtaaagcagcccccatcgttgcgtaccaagctgagatcgtcgtcttttgacctggtttcgtcttcaagaagcggacgccatcaatcgtgacattccccacatctaagttgaaaatcgcgtcattggtagccatttgattgatttctttaaagactggttccacccgtaatggtgtttgtggatcatcttcaaaactagcggtccattgatcccagttagctttattagcgactgctgcacggtagaaagctgtcttttcagataccggttcactagcttcaagtaaagctgctaacgctgtcttagcatctgctaaaatgccaacgtcaacatggtgtctatggccaagtttggttggatcaatatcgatttggatgaacttcgcatctggtttgaagaaatattgaccaaattcgtagttactgccgacaaataaaattaaatcggccgcttctgccaaatcaacacccggtttagtggccacccgccctgctgaaaccatgtaagctgggttttcgtcagcaacaattcctttagagagggctgatgacatcattgggatacttaatttatcggataacgccactaattcatcgccggctgccttagcaccttgaccaaaataaataatgggttgtttagcttctttaattaattgtaaagtctcttgaatatccgttgagcggggttctggataattccccatctggaataggttagcagttgcttcgaagttatcttcaattggttgccagcctaggtccgttggaattgtcacaaccgctacaccactatttttataggcttgttgaatcgcttggtcaacaactagtggtaattgttctgccgtcataacagtccggttgtagactgctacatctgcgaacattggattttcattcatttcttggaaataatcagtattcatgacaccagttgctacttgaccaactagcgctaaaacaggaacgtgatcatacttggcatcataaagcccgttcaataagtgaaccgccccagggccagctgacccgaatgtggccgcgattttaccagttgccttcgcttcaccagaagcagcaagcgcccctacttcttcgtgacgaacttgaatataacgcataattgctttttgattatgcaatgcattcatcgttgaatcaaatgagccaccaggtaacccaaaaatatggtcaataccccagtctgccatgacttttaacattgcgtctgccgcatttatcttttgtgttaccatctaaaaaggcctcctgattaattttattccgcttatttaagtataccgccttaattgtaagcgttacaaatgataagcattttttagccgttttgactggtaacgaatcgtcttttttggtatgcttgcatcaagctagataataatgattattaataagtggtcattaactttagattttagggaggcttttttaatggctattattgctaaagatgcacaagatgtttttaaagatgcgggcgaaaatattattttttcaacacttaatttaaatcgccagaatttctcatcagacagagctgccgtttcagatttggctgaacggatccccgcaattatcaatagtatgaacatccgctatccggatgcccatttacgcgttgcttttgggattggctcagatgcttgggactatcttttcccaaacgcccctaaacctcaagaactagaacccttccaaacgattcctagtcctaaacacgatgctgtcgctaccggcggtgatttattcttccacattcgggccaaagaaatggctgtttgttacgaagtaatggcgcaattcatgcaattcatcggtcaaaatgcaacaacgattgatgaaacccacggattccgttatttcgaaggccgctcaattatcggctttatcgacggtacggaaaatcccgctatcgatgaaacggccgaatatgcccttgtcggcgacgaagaccctgaatttatcaatggttcatacgcctttgcccaaaaatatattcattcgatggacacttggaaccacacttcaactgaagaacaagaaaaaacaattggtcgtaaaaaattctctgatcttgaattagacgatgccgaaaaaccaacaaacgcgcacaacgttgtttcgcaagataacgaaggtggcgtcgaacataaaattgtccggatgaacgtgccttacgctaatcctggtgaaaagatgactgggacttattttatcggctacgctcgtcaatggacaatcgttaaacgcatgctcacgaacatgttcgtcggcaaaccagccggcaactacgatcacctactagatttcagcgaaccaacaaccggcgcactattcttcatcccatccaaaacactactagcaaaaattgcggaagaagaaatttagagtgcgtttaaagcggtttgacgctgagcattagctgagtgttgggaataatcgccaaccttgaagagcctgggacaaaatcaatttttgtcccaggtcttttttgatgtccgaatgacgacacacttccttttttaatcgctttttgttgacttcccgcataccgattgctaaactgatgttacttactttaaataagaaaacgatgaggtgttttaaatgtcagatactatgcaagctgttgcgatcaaccaatacggcgatgaacaaacacttgaaatgatcactttgccaatgccaaccattggcgaacaccaagtactaattaaatcaaaagcaactgctatcaacccccttgactggaaattacgtgcaggttatctcacaagcatgttcgattgggcttttccaatcgtacttggttgggatttagccggtgtcgttactgaagtcggttcagctgtaacagattggcaagtcggcgacgaagtttttgcacggccagccacttctaatcgcggtacttatgctgaatatgttgctgttgatgacgaattagtcgctcgcaaacctaagaacgtcacttttgaagaagccgctgctgtgccattggccggcgaaaccgcttggcaagcccttttcaaccacggccacttaaaagccggtgaaacagtgctcgtccaagctggttctggtggtgttgggtcatatgccattcaattcgctaaggcaatgggcgcccacgttatcacaacaactagtgccaagaattttgatctcgttcgcgacttaggtgccgacgaaattatcgattaccgtaatgaaaaagttgctgataaagcacacaacgttgacctggtcatcgatacaatcggtgggcaaagccaagttgatgcttggtccgtgctcaatcctgaaacaggtcgccaaatttcaattgttggtgaagcacccgaaacagctgacattatcaaagacacaaagatgactttcaaagcaatctggttaattccaaatggtgaacaacttcgtgaaattgctgacctaatggctgacggtaaagtaaaatcaattattgatactgtcctcccattctcagcggaaggcttaatcaaatcacatcaactaagtgcaacacaccattcaactggtaaaatcgtcattaaattctaaatagtacaaaaaagcatcgccaagttggcgatgttttttttaatcgtgaaagagtttatcactatcagaacccgttcgattgccaatcacaaatgcttctaagatcacaaaaatcaattcgattgccgggaagaaataaatcgcaacaatcaaggccacctggatcatccagaaataaggcttcataataaccccgtaaatcggcatccctgtaatcttttgataaacctccggtgcaacttcgcggttggcatccgctagtgcgcgactcaataggaaatacatcatcaaccaagcaaaatgaaccacatagtagaaatattctgggccccgtgaattaataaaccgccccgcccaagcagtagcaacgggtaaaaatgacatcgataataaccatatattattcaaccaataaattcgttttgtcacccgtttcgttaaactaaacatgtagtggtgattataccaagcaacccctacgaagagataggttacgatataagcgaagaagtatggtgcattttccaataaggccttcatctcagccgtttctggtgttttaaattcaagaatcataatcgttacaataattgcaatgactgcatcgctgaaagcttccaagcgtcccttattcaataaaatccctcccaaatattaatagccattttatatttcacactattagttagcacccttatcattttaccgccattaaaaggatttgtcacgacctccctggaataatcaaccacgttaatcgatttatattgctttccccctttaactaatagtataataacttaaactttaggggggatttacaaatggataaaacatacaaatcaagcgctgaattaaagagcgaggctaaggcactctatgcgggacattgaggccaagcaatcaagcttaatatcgtcccaacgctcttttcaattctcgcttttatcttaattggtggcctctttatggcactcactgcactcttcatgacatcggactttgtctcatcaggctctggctcatttcctagcaatatgtcttctggtaattcgttgactggtaatattggtagcttcatcgttggtttaattactttggggatttcatttacgacgctcgattggctccgctcaaaagatgctgactttaacgcttttagtggtgcttttagcgtcttttcaaaacgttattttgtcggagctgtcattactgaactattagccggctttttcaccgtcttatggacattactcttcatcatccctgggttaatcaaatcattttcttattctcaagcgcctttcatcttcaaagatttaacggacgctcacccagaagccgatatcaattacctcgattgcattacaaaaagtcgtgaattgatggacggtcacaaatttagattcttcatcttaaaattaagtttcctaggttgggatatcctggccggctttaccttgggggttggctatatttggttaaacccttataaacaagcagcttacatgggcttttacgccgacttagtgggctagcatactgaaaggattggcgattgccaatccttttttgttacccttaatgatcgaaacggctaaaatagagaagaaaggatgtggcatcattgatttcaaacacacagatcaccctagattctcaccaaaattggcaaactgttactactcagattccaacacctggcgaccacgaattactcatcaaagtccaagccgccgcagtcaatcctattgatctcaaacggcgcgccgttacaacgcatattttaggctacgatggttacggcgaagtcttagcaattggcaaaaccgtcacgcaatttaaagttggtgatatcgtctattacgccggttctactcaactagacggcagttttcaagcctaccaatgtatgaccgaagctctctgcgcactcgcccccgaccaattatcagcgagtgaagcggccggcctgccgctagtctcattaactgcctacgaactactttttgaaaaatttcatttcgaggctgcagaacaagcccacctcggtaaaaaccttttgattattaacggtgctggtggggtcggctcaattatgagtcaactcgccaaatgggctgggttcaccgtttatgccactagcagtcctcaaaattttaactggctaaaagctaatggcgtcgattatcctattgattaccaccaaacaagtgaccagcttaacctcgatcaactgccagccgaccacttcgacgcgattgccgttctttacgatgtcgcaccttatttatctgccgcaacacgcttaatcaaaccactcggtcatgtcggctcgctggttaatatgcaagccccacttgatttaaccccactgaaagcaaaatcagtcacatttgattgggaatatatgtttactaaaacagattttgattacgagattgccagccaaggcgcaatcctcaaaaaaatagcgcgcctcgccgacactaatcaaattcactcgattacgacgcaagtctaccaaggcttatcggttgaaaacctcgacacaatcacaaccgaacttacaaaaggccacgcaattggcaagtatgtgctaacctactaaaaaaagagctagcgacaaaaattacttttgtcgctagccctttttttagtctaataagccatatttaattttaaaacgttgaataatccgataccacgattgataaaaacaataaataaagaacacgttcgatagtgcatgggctagatcgaaataaaaactcgcaatataggctgcgatgaatgttttgagcgataagggattaacataggcgataaaataccataagttcattacccacccaaaaataaaaccccaaataaagccgaataggcaaagccaatatttattgtgggcccaatcaaagcggctaatcagcccggctgtcacgcccatcatcccccaacaaaacatctgccacggtgtccacggcccttgacctaagaagaaattcgaaaccaaggccgccgttgaaccaatcatgaagccagcttccggacccaaaaccaaagctgcgacaatcaccacgaaacttgttggttgaacactcggtagcggcgcaaaagggacccggctgaccgccgcaatcgtcgctaaaacggcaatcatcacaatttcacgggcccgaatttgacgtttttcaaagcgccaataaaatggcagcatactgaccactaaacaaataaaactcaacgctaaaaaatactgtccctgtaattggatgattaagcctaataaaaccgcgattattaaaaaggcaatcccaaaaataaggctactttgccagtcaatgcgcttcatcggtcaacctcttcccaagtcaacgccgcagagttttgtggtcgtaagagtcgattaatcggggtggtgtaaaagaagttcgattggaaaaattggtgcggtgcttcttgcgcaacaatcgcgccatcaaataacaaagcacattggttcgcaaagcgagcgctaaagaccatatcatgactagccatgataatcgttaatccttctacttgtaactgctgtaataggtgtccaagtgcttgtttacgcaatggatctaagccttttgtcggctcatctaaaatcagcaacttcgggttagctaataaaataatccctagcgcaatcaattgctgttcaccaccactagtatcttgcggatcactgtctgctaaagcagttaggcctaacttggccagcatcgctgtggccgcttcctctggatgttcacgcccgagttgaacggcacgccgctcaaattcaacccggacactctccgcgctaaactggtcagccggttgttgagacaaataaccgatcactttaaataactgctctgtcggccacttttgtagcggtcgttccaacaagcggaccgttccgcgacggggttccaacaaaccaatcaatacttttaaaagtgtcgacttaccaatcccatttttaccgacaatcgctaaccaatcacccgtatggaccgttaatttgagctgattcaaaacatacggctcatttttggtatattgaaaatctaaatggtcagctgttaataatgtttcttgcatcccggctactaccggacgtaattgatcatgaatactgccgactggcaattgacgttgcccggccacaactgttagtggcacggattcagtctcagtggttagttgttgttgccaaaaaagccgcggaatctccggcatgaaatcccgtaaagttggttgctgccaaattgcctgtagaccttgatcaactggtccttgataactgatgcagccgtttgtcattaaccagagttgattggccaacggtaacacatcatccaactgatgctcactcatgataatcgttatacccaattcatcatgcacgcgttgtaataagctcataaactctttggtcgcaatcggatctaattgggcagtcggttcatctaacaccaataggctcggttggagaatcaaaattgctgccagattaaccagttgcttttgcccgccagataattcatggacagatgcgtataaaatatcctgaatgccaagaaaactaacgagttctgcaattcttttttgaatattggcactggcttcgccgctattttccagtgaaaaggccaactcctgaatcacggtatccattacgagttggttctcgggattttggaaaacaaagccgattttctgcgcactaacagctgggtcaagatccgccaatagtcggccattaaacgacacctgtcccaaacgctgtcccaccggccataattcccgtttaaattgacgcaataaagttgttttaccactacctgaagggccggccacaacgacccaatcaccagcattaaccgtcagattaatctcggccaagctcggctgatttgctaatgcatattgaaattgaagctgttctatctgtgcaattgccaccataagtactcccatccttccaataataatggtaacccatcaatcaacaaaatcacgcttagacacacccaatcacggctggttaaccgcaatgtacctagtgttggataaacgattaactgcccgttaccctgactggcgcaccaaaaggcgaataggccaccgctaatgagcgccatcaataggccataatcgcgatgcgtcatttgataacggcgatacgtacttcttttttgaacaccaaagccgcgggccgtcattgaatcggcggtctgcagtgcttcagtcagtgtattggttaataaaattgccaacagatgcatccctgcttgggcgcggttttttagccgccccgttaccatttgaatccctcgcgttcgttgcaccgccgtaatatcgcgtaaacgccgaatgaataatggaaaaaagcgcatcgtcatcatcgtcagtaacgtcaattgcggggcgattccgccaaataacgccaaaaatttatgattggtcatatgctgattataagtcacaaaaatcaataataaaacggccaaagcggtcgccattaaaaaaccatagaccaccgcttccgccgttatcagggtaccgccaaccgtcatcataacgtgcgtcccgtgattattgataattggattcatgatgacaatcaggaccatcatcaataaggcaccttgcagcgtgctaactgttttctgttgatttttggcgacccaattaaccgcaataataacgatcagttggccacataaaaagtaagggtgattgaaacacatcgaaaagctaatcattaatatgaagtacaccaataaaaccagtgggtgtaattgatcaataatcagttgcaattttagccctgaggcgcgtggcgatcgtgtccgagatcttccgtatatagccaatcaataacatctccactcttcacatgatagacaccacacgattgatttgaaaaaacgccgttgacccgatagagccaaccactctggggccccttatcgaattcaaacaagccattaattcctttgacataggcgctagcaccaatcccacggtaagataacggcatgccttgttggcccgttagccgttttaaaacggccagcactgtctcaccatcatcaatcgttaccgaagcatgattaattaggggtgcattgccttcactaatcggcccataaacgcttaatgttactttttgggcagccggttccggttgtttgactggtgcttcgtgtgactcagcatgctgtgttgattgttgcgctgttgaaactaccgcactgcttgctgattgacgtgttattggtgtagcagtcgttgctgactgtgaggttggcgtttgtttagctgacgcacttgcctgttgttcttttttagcaacactggcttgttcaaactgactaacctgattggcttctttagattgtgcctgcttagaagcgacagaatgcttcgtctctttagccttagtcttagtaggcgtcttttttgaagtcgattcggcgtgcttgatgaccgccttgtgcgcgactttttttgattgcgtcgattgctcacttgcatgtttaactgtggttggttgctgttgaacactcgcataggtcccgtagccgattccacctagtaacacgagacttgcaacgcttagtagtaagcgctttttaaccatctagttgcctcctagcgttgttttaaacgacgtgtttggtaacttgcaacaccaagtaatatgaataacccagctaaaacactaccccaaacagattgatgacccgtttgtggtaaagcatcttgcgtcgcagttgtgccagtcaatggcacttcatctgcttcattaatcggttgtttaggtaattgtttatctaaatcaacttctgaagatgatgatgccgacgattcaccggctggctttttgccaggaatacttggctttggagctggcgctggctttggatccggttttggctttgggtccggttctggcactacttttttaaagttatagattgaacccttacccttcaataaataatcatattggcctaaagcatagaccgcttgttcggttgacattgataacgcgccatcatcgctgcccatcatccagcggaattgcccgtcggctttttggtaagcaattaagttcgtgattggtgtcgcacccttatcacctacaaacgttgtggctggattgacgccagctgcggccaagcccaagatcgccattgccgtgctatttgagttttcttcggttgaaaagccaccaggaatcaagaaaccacccgttgctttcacaaaaccagttgtttttaataaggcaactgcgcgatccaaagcgctttgaaccttaggttgatcacgatgcatgcctaatgctgacatcgtcatccccgtaatatccaaatcactgactaatccgaaaaaggcccaaccgccagctgtgttttgttgttttaaaactaaatcgattaattgattaatcgtttggttagcttgtgacccgtaatcttgggtgctaagggcaataatcccatatacttgtcctgtgataccggcagtagccgcttttttaataatttcagcaattaaattaatgccgttgaattgtgttgggtcttcgccaattgcagcgatcccaattgtcaggcgttccaagtcggttgcagaataatgaccggccattccggttaattcttcagcaaagacttggtggaacgttgctttttgatcggttgttaattgcgccccagaactgatacgggccaaagccgcccaaacttcagtatcctggctagttgttaattgttgcgccccacgcgccatagccccttgatagtcctgatttaaaacagctttagcagctgattttacaggttgattattggtcgtctgcgctgttttagcagagacttctgccacttgtgaacgtgaagacgtcccttgactctgacggcttgattcaaccaattgatcactggcaacttgactgctagttgattgactagcactgagttgacttgtcgcaactgattgctgaccggtttgaatatctgtcgcatgcgcactcgtcgcacttgtgacagctggtgctaataataataaactcgcccataatccggtatagatttgttttcgtttcatataatattcccctacccctacaaacttaacttttaactagttacttctattttaacaattttttggtgaaagcaacatctttttaaagcactatcattagattgacagattatttttcgtaaaaagagctcattttatgcgtactatcgtcacaatttattcaatatatccgcctaaactgattattattcagtttttataaggaggcatcattatgaactttttcaaacgtgcttggcaaaatatttcattcaaaaaaggccgtagcttattattagtcattgttatgattgttattcttgtcttcattatggccgggttactcattagaaacgccgcagtaacaacggttaacaacaccaaacaacaagtcggtgccagtgtcaccttatcggccaatcgtgatcaggccttcaagcaaatgcgctcgtcgacaccaccaacgagcacttctaaaacgaagaaaccatcgctcagcatgccttcggttagcttagccaacgtcaaaaagattgcggcattatccggtgtcgccaactataacgttagcgttgcaacttcggctaatgctgattccattgatgcgattagcacttcttcagctagtaataatggtccgatgggcatgtcgcaatccacctcaacaggcgatttcaaagataacaccaataaaattaccaaaggccgtgctttaaccagtgccgatgttaatactaacaacgttgtgattgaaagcgaacttgctaaacaaaacaatctcagggttggcgatacaattaagatcaaagccacaacgactggtaaaaaagcttacaccctcaaagtcgtcggaatttacaaagcgagtcaaagtagcagctcaagtatggggcctcaacaaagcgatccttctaatacgctttataccgcttataccttggctaaccaaattaaaggtcaaaccaataaagtcgacagtgccgtctttactttaagcaaccctactcaaaaaacagccttcttaaaagccgctaagaaaattatcaatactaagaaatttagcctcacagcagacgatagtacttaccaaaccttgaaacaatctatgcaaaaaatggaaagtttcgctaataaaattgtttggttagttgccatcgcaggtaccgtcattttagccctaatcattatcttgatggtgcgtgaacgccgttatgaaatgggtattttactctcattaggtgaaaaacggactaagattattgggcaattactcgttgaaatgttcatgttactaattgtcagcttagcactcgcgggtatcggtggccaatttgccggtcaagcgctcagcaagcaagtcatgaattccgttacaacaaacaccacaaccgatagcacaacaactcaacctggcggtaatggtggccctggcggcggtcaagcaccaagtggccaacctggtggtaatcgtctcggtggtcaaatgacccaaggcaatccaactaaagccaaagccattaaagcgagcgatttaaacctcaaaattaatccgttaaccttacttcaattaggcgcctttggtttcaccatcattgctttggcagtcttactagcttcagccaatattctaagactcgaaccacgaaaaattctcattggataattaggaggtcacattatgttaacagccaaagatgtcagttattggtacgattcagaagaaaatacactctataaagacgttaatctcacctttgaagccgggcaactctacggcattatcggtagtagtggtgccgggaaaacgactctcttaacaatgcttgctggtctcgacaaaccacgcaagggtgaaatcctctatgaaggcacttcacttcaaaaaatcggtttgacgcaataccgcaaccgctatgtttcaattgttttccaagcctacaacttgctcccctatatgtcggcactcgataacgtcctaaccgcaatggccattactcattcagaacgagaaaaccccagtgagtttgcgctagagatgctgactaaggtcggcatcaaccctgatatggctcgtaaaaacgttcagaaactatccggcgggcagcaacaacgggtggcaatcgtccgggcaatgtgttgtgatgcaccagtcgttgttgccgatgaaccaaccggtattttagacgacactaacacccgggaaataattaaactgttccaagagctcgcccacgaacaacaaaaatgtgtcatcctcgtaacccatgaaaaagaggtcgccgcgagttgcgacgtgcaatatctattgcagcacaaaacttttgaagaagtcactctctaaaatcgcttaaaataaactgtcgatagtaagctgaacggcagtttattttattgaaaattgttatactgaagctaccaaatggaggtgtcttcgatgaccacaatctactacgattatttaacgcatggcgatcaaaacctagtcgttgccgcaaccgatcacggcgtctgctttgtcggttcccctaaccaaccactcagtgagctaacaacttttatgcccggttatgacttacgacaagacccctcgaaactggcgccagcgattgcccaaataacggcctatctaacgcataagagaaccacttgggatttacccctcgacttcttaggcggcacgcctttccaacaacaagtctggtcggccttgcaggcaattccatacgggcaaaccgtgacttaccatcaactagccacacaaattgggcggccaactgcgattcgagcagtagcttctgctgttggacgtaatccgctactaataattgtgccctgtcatcgcgtcctccgtaaagatggctcattgggtggtttccgtggcggtttagcttttaaaaaacagttattagcgctcgagcactaaaaaaggtgtgccccctcggggggcacacctttttaaatcacttttttagcgttcttcgctacctaataaacgacccgtaaaggctgctaggatagcacccacgattggggctgctaagtaaacccaataatgagctagtgctgaaccaccagcaaaaatagctggtccaaaacttctagcagggtttaacgaaccacccgttaagttaagcgcaacgataatcaataagctcaatgtaatcccgattgccaatggtgccatttgactattgccaaaacgatcactagttgtcattaagattaccaagatgaaactgaacgttacgatcacttcaactaagaacgcaactcctgccccaattttaggaaaatcggtttgaccaaaaccggtccgacttaaatcaagcgcattgatgagaactgataataaccctgaagcgacaattgcacctaagaattgcgctacgatataaaaaacgccatcttttgcttctaagcgtttattaatcatcatcgcaatagaaacggccgggttaaaatgaccgcccgaaacgccaccaaaagcataagccatcacagtcactgttaacccaaatgccaagccaatcgttaatgtatcagctttagcaattacaaccgcaccggttcctaagaacactaacataaaagtaccaataaattctgctgcataacgtcgcataaataattccttctctctaacttgttgtgaaccctattaattatacaattaattgcttttgaatgcatcaaaaagggctcttaattcagggcattaagcaaataatttgatattatgctattaaaagcctatacttattaataatctaggcgtaaaatataggcttattttacccctttttaaactaagtaaaagagatgatatattacgcaagtaactgatgtctatggtattacgcatgataactgtaaactaatcgaaacagaaaattcatttacgcgcattttcttggcccaaggccctgatggtacacgttatacatgtctcttaccagacgctaaaccaaacccaaaatccaatcaacatttcgtctacggtaaccccgcagatgcgccatactaagtatcatcaaaaaagggccgccaactaaccgttggcggccctttttatttcccggggaattactcagcaactaaaatatccaagaataattcaccatatttttctaatttattctccccgacacctttaacatctaacatttcagtcagtgaggttggcataatttcacacattgaatacaacgtcttatctgagaagattacaaatggtggtacaccctgttcttcagctaaatcacggcgtaattcgcgtaagcgttcgaataactcattgtcttcaggcaatgttttttgaaccttagcagccattttacgtgacaccttttcttgacccttaagtactttgacgcccgccaacgtgatctgtaaaacgggatattgaccaccagaagcccgtaaatagcctgacgcaactaagtaatcaatcaaaccactgacttctttttgtgaatcgccccgcatcaaaccgtatgttggcaattcatcaaagcggaactgcataatcttctgattcttagagcccgtcaatacttgcgcgaccattactttgccgaaacgttcatccattcgcttgatacacgataaaaccttttgggcatcaattgtaatgtcttgtgattcgcgtgtatcaagacaattgctacaacggccacatttttcacagtcatcatcaaaataattgacgatatattgttgcaagcactgttgcgtgttggcgtattgtgtcatttcttgtaacttagcgtattcccgttgcttattttcatcgtccatctctgattgatcgatgaaaaaatgttggatttggatatcattgactttaaacagtaagatggcctcactcggtaagccatcacgtccggcccgacctgcttcttgataataagcttctaagctgccgggaatttgggcatgcacgacaaatcgcacattactcttatcaatccccatcccaaaagcattcgtggcgaccataatcggtttacgatcgtagagaaaatcctcttgattttgccggcgcaccatttcatttaagccaccatgatacattgtgactgccagtttcgctttttcaatcagcttcgtgagccgttcaacttctttacgtgtactagcatagatgatgccggatttttgcttattaacctttaaataatcgattaagtagcgatcactattttggtttttaaccacttgaaaggccaggttttcccgtgaaaaaccagtcttaacttcatgttgaatccctaagcgcaacataatatcatcagctacttgtgacgtagcagtcgccgttagtgcgacaattgttggttgttgtcgcatgcttttaattgtatccgttaagcgtagataactaggccgaaaatcgtgcccccattgcgagatacaatgcgcttcatcgacggcaatcaaatcaatcgttaattcggctaaatccgctaaaaagtaatcagagtccaaccgctctggcgacacataaagcaacttgacttcaccacgcgccgcttgattaaagcgctcctgcacctcaccttgcgtcaaggtactattgataaacgttgccggaatcccattttcgttgagcgcatcgacttgatctttcatcagcgaaatcaatggtgaaacaactaacgttaaccccggtaacatcagcgccggaatttggtaacataacgacttcccgccaccggttggcataatcgccaaaacattggtccctgctagtaaggattcaatcacatctgcttggccttctctaaaataatcatagccaaatttttcttttagtactgcttgtgcctgcatgccatttctcccacccgttaaaattcctatctactatcataacaaaaaaacaacaccgttgcggtcaaaataaaaacagtccctaatactaaggactgttctctattattaattacactgtaattctgcctcttaatcccactactgcccaaatcataatatttaatgagagcccgataaacggaaatggtgggtaaaaaagctgacgatcaacgtgataaagttcaaactaaatgaaacaagttcgccaattaacaacatatgcatattgtgaattgggttcgttttgatgaccaatcgtcttagataagcggtcgtgatattgaatagtaagacattcacgttatataacgttgaggcagctactgaatgaatatccgtccccaaccaagccgttgttgctggcaataatgatgtccagaatagtaataagatattcacccagataatctggccattaatttgcttcgcttgcgcaaacaaataatgatgattaacccacattgtcgcaataaaaataaaagtcaatacgtaggcaaaaaatttcatccggacatctaaaatcgccatccatgaatgatcatcctctggaagatgtagttccaatactaaaattgttaaaataatagcaattaccgcatcagtaaatgcttcaaatcgttcctttttcatcaattaatcactccttatttttttattcaagactagtttacggtattcattagctgacaaccagtcttttttagtgtttaatcaaaattaatgactcacgatggaggttttatgatgattaaactgcaagttaacttaaagaacacgcaaactgagattctttttgaccaacaaatactaaccatctattcggaacaaccggccacattatcaccgtttgacggcctactactgcatacaaaccaacaacaaatcacgcaaattgactatctcgctggggaaatcacgaccattccaaacggaccctttttaacactcactgatgcggactggcccgaaggtctaccttatttaggttgtttgttagctgaacaatcatcagcaatcaaaacaactgatttaccggcaaaagtccccagtaactaccgccaaactttacggccactgtttgaaaccttaaacttaattctagaaagatttggcttcaattggcagccagcgatggccccaaaagcaaaaccggccgctaaagcacggcaccgttggacaaaagccatcagcaccgtgccatttaccattgcaacgcgacaagcaaccggaaccgccatttggcaaaaacgaaacgaaatgtatctcaaagcgggcgcaacgttaatgccggaaccgcccctcaacaaggatggctcacttggctttgccgctaaaatgggtgcccaattgcgccatgaacacagcaatcaagttcaagataatgtcacaacagaggatattatcttcaaaagtgtcaatgaaattgggctatttctctactttggcggcaccaatagttggctagaactcattgatcaagatggccgctcaattgatgactggtcaaaaatttaagctaaaaggtggtttatattgttctattttttaatatgtgtattatatatttaattccaacagttaagaatactataataccagcaaataagaatagaaatccaataggtagtaagtagaaattttcatgtaatatacctgatgaatcaatgtattctactgaatttgcttttataaacaaacataaaaatccaattattaacagtattgaaccaacggtcgtggttgttaaattcattttagcttttcttgtttcactaccgtcattgattaatttttctgtcattttattcatagtaggtcctcctagtattaggtaatcaagtgaaatatgaaatttttcagaaattaatactataatttctagatctgggagatttctaatattttcccaattggatactgcttgtcttgaaacatttaattcatttgcgaatttttcttgtgttaggtatttttctttacgtaattttttaattttatctccaaattccattgtattaaattcctttcacttgtgtattcttaatataatgcgtgcgtgcttataattaaagacagtatagctttccatgcataaatgaaagctgtactgtctttaattatttggtaaataataaattatatttataaattaacataaaagtggcattctacgaagtctttacacccacatgtgtctcagcatggagttgcgtggtatagagttttaatgcccattcactaagtttctcaacatccgaaacttagtgaaattgtattttgtgatattattagggtagtcaattattttatatacgggaaggaagatcaatatgcgaattgatactagcaaatatcccactggcgacaatgccgttcaccctaaaaaggttagacgtttaaaaatacttagcaaggttgctactattacctgcattgctatgtatgtatcttatattccacaaattatagccaacttttctggatcaccagtttcgcctttacaacctttggtagcaacgattaatggttgcttgtggactggatattgatggtcaaaaacttataaggattggcccgtcattatagcgaatatcccaggtgttatttttggcttagttactgtaattactgtatatattcactaaatatcaggtgtcgaataacccaacaaataaggggtttcagtatatagaagtctgattattaacgtctgattataacagagctatttatcttattttgtgaaccatgcgtggtataggtatgaaatacccgtctaatgcgtttctcaaaactcaaagcttagtgaagttagctgtttttgttaaccgaaaggctattagttttatagtataccgctgatatcagtgactttttcatttggcaaccaccatgaagggccacatccttgataatacccgttctgaaagcaaaataccgtcaatttaaacactaaggtgacagtcttttcagcatgacctaacacttttgttaaccggcgttaaaaacatcgctttttaacgttggtcagtatatgatacctttatcaattaaataatgaggtgttttcattgaaaaagaaaatgattagtctggtcgcgattgttgcgctcatcatcgtcggctttgccggttataactactataaaaatacttactagggtgacgttggctacgcccaagcgcccgctaaaacgcctaccaagcaagcgacaaaggacgatcaaggtaaggttgtgccaaatgaatacagttaccgttaccaactaaatgttgttaaagaagatggtacgcgaacaactgtccctgttgaaatttctagcgaaaaaccaacaccattgacacctaacagctacgtcaaattggaattcaattcaaaacgagttttatccggccctaataatatcgccaaagataaaatcccagctaaagtacaaactgaattagaaaaataactaaaaaaggctaaatgtttcgtgtgaaacatttagccttttttagagttgttttaacgcttcgcgttgcgctaatgccgataacgtatgtgtgtcgacaaaatcaattacccattccggattagtcttagcgtaatcacgcaaggcccacccaatcgctttttggatgaaaaattccggcgttgtttgatcgtcttcgatagcggcttgtaaatagtcaatgcgcgttgcgtccttgaatcctaattgcagaatcaacccgacgcggcgtaaccaaaaattctctttttgagcaaatagttgcccgacccattcaaattcagctggatgacgcttgatgtactcgctaaaaacacgtttccaaggatctacactgtcccatcatgctttttcagttactaattcggcaaactgcaatatatctgcactttgccatttgcgcacggcccgcgccgcaatatcgattgcgacatattgatattcgcgcgcttcacgcgcataaagtgccttaacaatcaccatcagttctgccgctggtaactgtttcacggccggccaaaagtcgcgttcgtaagcatgtctctcggtcgctttgacaccgttaaaagtgaactgatcttgcatatatcgcgccatcgctgcttggttttctgggtgaatgggtaactcgaatatcaacatcatttgcctcctctacaccgttttattccaaaggacctttttatacggttggccttggccttctaagatcgataggctcgcgtttgccaccattttttgatcgcgaatagcactaaacggcacgcctaaaagggctcccatgacaaacaataaaacaatcccgtgcgccacaattaagacgttgccctctggataagcttgttgggcttggtcaataaccgtcatggcccgttttaaaacggcttggtaggattccgcgtgaatctgattggcatcaaataaatctggatggtggaagtaattatcaaattgcggatgcttttcttgcgccgctaccggctgtgcttcccaatcacctagcgccatttcccgtagtttaggggcaatcgttaacgccggttgcacaacgcgcgattgcgccagtaagtgttccgcggtcgtttgggcgcgttggagcggtgacgttaagatggcatcaaaaatttggtcgcctagataatcacccaagcggtctgcggccgctatccccgctggtgtcaacgcagaatcgaccccaccgccattgaaacactgtgctttattaatggtcgtttcgccgtgacgtacaaaataaaaagttgtcatgtttatccccactttcgtttctccattatactataagaaagctgacacccatttcaatcgcaaaagaggctacgacaaattttgccgtagcctcttttaatttgaccgccttatttaatattgacgtaagtcaaatcaaacaagtgacttaaatcttgtaattgttctgaatcaacagcaaatgataaaactgtatggtgaccaccaccaacggttaaccagccaacggcaccttcgcgtaaaccttgttttggtgtccagagttgtttagcaactggcaagtgtggtgtatcagcttctggtttgttgccgcgaacatcatatgacatcaatttgaattcgtcgccataatcagccattgtgacgtccacagcatcgccttgcatccctgtgaagactaaacgtgcaggatcgtctttatcgccgatatctaatgggtgcacttcaacccgtggtttatctgacgcgattgaaggatcaacttcaagcatatgtgaccccaagatagcttcgtggccttgacgtaaatcaagtgtgtaatcttccatgaagaccgtcttttcattatgagccataatcttcaacaagcggtctaaagcagctgtcttccagtccccttcaccggcgaaaccataaccttcagccatcaataattgggctgctaaaccaggtaattgttccaacccaactaaatcttcgaagttggttgtgaaggctgtgtagccacgatcgtccataaatttcttcaaaccgaagtattcacgaatttggtatttaacattgtgttcgaatttttctggtgtgttttgaccttcaacaaagtcgtattctttttgtaaatcagcatacttagcgtcgatatcagcctctgagacagcattgacttctgcgactaaatcaccgacaccccaataatcaaccgtccaaccaaacttgatttgagcttcgactttatcaccgtctgtgacggccacgttccgcattttatcagcaaatgtcacgactttaatcttaaatgattcgttgtaagccaccgcaacgtccatccatttagccattgctttttgaacgtcttcatcaccccagtaacctgagataatcttgttatttttacgtaaacgcgcattgatgaaggcatattcgcgatcgccatgagctgattggtttaagttcatgtaatcgaaatcgattgtgtcgtatggaatcttgtttaagaattgagttgctaaatgaagtagtggtttttgtaataattttgtcccgcggatccagtttttagcaggtgagaaagtatgcatccaagtaatcacaccagcaacgtgatcgttgtagttagcttctttcatcacttttgtaatgttatcagcagttgttgcgactaatttgaaaacgattgggtaaggtaattggtgactcgcgtttaatttttcaacgatttccttagcgtctttttcaactgagcggagggtttcttcgccgtataatgattgactccctgtgacaaaccaaaattcataattttctgtatttaacatgataaagactccttttttagcgtgctttttgaaactgactcttgcgcttaacgacatttgtcaaatcagcgattccatcgctaatctgtcaaattaagttaatgctcagaatcaactcgtttcaaacgcactcctttttttaatgtatttttcaaactaatcacttttgacgtacttcttttttaacgtgcttttcaaaccatccttctgtggctagctatgtcccgcaaacgatcgactttgtcgctcattcacgggactaggctagtcctcgaaggatacctggtttcaacgcacttcttttttagcatgaccttgtgattgggcgttattttgaccgtagtaggcatttttgccatgcttgcggtaataatgtttgtccaacaagaattgtggcacggcactgttattgcgtgtcaattgaagggcgtgataatccatttcggccaccacttctaagactttagcgttataaacggctttgtctggtgtggcaccccaagtgaaaggtccgtgttggcgcacaagcactgctggaacggcttcaggatcaacgccctgttccttgaaggttttcacgatgaccttgcccgtattttcttcgtaatcattttcgatttcggcttgtgttaaagcttcagaaactgggacatccccgtaaaaagtatccgcgtgtgtcgtgccaagtgcgggcaccggaataccggcttcggcaaatgaaacggcccaaggtgaatgcgtatgcacaatgccaccgatttctggaaattcattgtataaaacggtatgcgttggcgtatcactagaaggattcatattgccttcaacgacttcgccttttaagttcacgacaatcatgtcgcttggttttaagtcttcgtaatcaacaccagaaggtttgatgacaaacaagcctttttcgcggtcaattccggaaacattgccccaagtaaaagtgactaggtctaatttaggtaggcgcatattggcgtcatacacttcttgttttagtttttctaacatgctttaatcctcacttctcatctttaatcgcagcaattgccgcactttcaattggtaaccctgcttggtaggcctcaataaaggtttgataaccagccacacccgcggcttctggactgagcgtcatgctttctggattcgtaaagacgttgtgatccaagaaatcatcgagcgtttgaccattattatcagcggcaaacattgctaagacagccatgccccaaggaccaccctcaccggcattactcataaccgtaatcggtgtgtttaaagcattcgctaagacttgttgtccaacgacgggagttttgaacaatccaccctgggcaatcatgacatccgtcttgatttgttcttccttcaccaagatatccatcccaattttaagcggtgcaaaggctgcatataattgggtttgaataaagttaggtaagttgaagtggctatgcggttgtctgacaaataatgggcgaccagccggcattttagtgacattttcaccggataagtagctgtaattaatcaaaccacctgcgtcttgatcggcatgggttgcttctaagaacaacgtttcgtataaccgatcaggcgctaatgaaactcccagacgtgctgcaaattcattgaataaattagcccaagcattgatatctgacgaacaattatttgtgtggaccatcgcaactggtgagccatcaggggtcatcaccatatcaatatcgcgatgcacttgtttgagccggttggtctaacaccaccattgaaaaggctgacgtcccgactgagatgttcccagtccgtttgcggacgctgttagtgccgaccattccggttccggcatctccttcaggcggtgccatcaaactacccgccatcaaattaccacttggatctaataactgcgccccggctggcgttaattggccagcagtgtgtcccgctggcaagaccgttggtaaaatatcggctaactgccaaggttgttgttgaacgcgtttgatttgatcgaattgtgtgactaaccgcgcatcataacttcccgtttggggatcaattgggaagacaccggatgcatcgccaatcccgaggactttttcacctgataattgccagtgaacataacccgctaaggtagtcatgaaagccacttggctgacgtgtgcttcatcgtttaagatggcttggtataaatgagcgatgctccatcgttgtggaatattgaaattaaattgttcggttaattcatcagccgcttgttcggtaatgttgttacgccatgttctaaaaggcaccaataattgatcgtccttagaaaaggcgagataaccgtgcatcatcgcactgacaccgatacttttaatcgtggtaatcggttcgtgatacttactttggacttccgcagccatttgcatatagctcgcttgaatcccggtccaaaccgcatcaattggatacgtccagacaccatcttctaattggttttcccaaacataactccctgacgcaatggtttgaaaatcttgcgctactaaaacggctttaatccgtgtggagcctaattcgatccctaatgagacctgaccggatttgatggcttgtgctgcttcaattaaattcatcatcatctttcctctctgacacttatgctttatgcgccttgtttgtgccttgcgcttcaatttcttctaatgtgtgacccattgtttcagggacacaagttctaatgaagaggacacccagtaaacaaatgacaccgaaaatggcgaagacctcttcttgtggcatggatgcgatcatcattgggaagagtaacccaactaagaatgagccaatccagttgaatgatgaggctaagccagatgctttaccccgaatagctagtgggaagatttcaccgactaaaacccatgtcagtggtgcccaagtaaaggcgtaaaaggccacatagagacataagaaaacgacaatcatcattgggttaaagttgggaatcagtgcattcatgatggctggtaaaataaatgacaagcccatcacggtcccaccaagtgttaacaacgtccgccgtttaaacttatcggcgatgactaagaataaaagtgaacctaaaactaagatgaccccttgaataatcggccacatcagtgctgaactagcggctttgcccgttgccttttccacaatcaatggaatgtagtagaaaatggcattagcgccttggaattgttgaaatccagcaaccccaatccccgcaatcacgagatatcgatatttaccacttaaaagcgttttcatcgaagtgctttgttgaacttgaacgttactttccatgccggccgtcgtctggatattcgttaattcagtttcgacctcgtcttttgaacggatataaccaaggacttgccgtgcttcatctaatcgattgtgtttcaccaagaaccgtggggattctggtaaccgtaaaaccccgaaatacaaaataatggctggtactgcggcaaggcctaacattaagcgccatgctaattgttcaggcaaaccttttaataaataatccacaatgtaagataacaacatccctgaaacaatcatcgtttgattaatcccagtgagtcggcctcttagtctagctggtgccatttcagacatatatgccggtactaaggcggatactgccccgactgctaatcctaagaagacacggacggcgattaagtagacctgtccgtcgtttggcgagaatgctgatagtaatgagccaattgcaaaaatcaaagatgataacaaaatcatcttccgacgaccccatttatctgataactgtccagcaagtgcgccaccgaaaatggcaccaaacattactgccgatgtaatccagccaacaaccccagcattattctctaaatgccagtcgtgttgtagaaagggtaacgcccccgtcattacgccaatatcgtaaccaaactagatcccaccaaatgagccaaagcagtaaataaagctacttggaatttttttagcctgcgtcatgcttttttcctccatctttttttaagtctatttaacgtactttttaaatgaccgtttcactttataaaacggtttcaacttgtcgacaaattcagtctataactttcattcgaataaataaatataattatttttgattcgaaccaatataagtaagcgtcatcattttaaaccgcatgttattaggcttttgctgttatataatttttttaaattaattggccaccattttatttattcgaataattatggaaactaaaaaaggggctatcgtcagatagccccttttgagatacgtccttatttaacttttccggcagagttccgtttaattaatggtggttggtataggatcgattcaaccggtttatcctgaatcatgtctaagaccatttggcctgcatcctcacccatcttcgtcttattatggttgagtgttgtcagactaggactaatataccgtgacatttgataatcatcaaaaccaacgactgaaatatccgccggtacttttaagccttttgatttcagaaaatcaataacccgaattgcgagttgatcattgtaacaaacaattgccgtcggtacttctgaaccttgtaaataatccgccacacgtttcaatactttctcgaaacagtcgcctgattgatacataattaaattactcttatacgcaattgcaggttgttgttggtaagcttgaataaagccattcatccggtgaacgccttgcagatccccgacttggaaaatacctaaaatcgcttcatgaccgagttcaaagaggtaattaaccatctctttttccgcttctaaatcatcatttgtaatgacgggaaaatccaattctgggtaggaagcattgataaagagcgttggaatttgatcgtcttgaatctcgtggtataaatccatattcggatttttaagcgcactttgtgtgggttcaataatcaaaccagcaaccttattatcaagcatattaatcagactcttacgctctttttcatgatcattatgcgtattgctaatcagaattgaatagccttttccagaaagtacccgatcaatacctgagataatacttgggaaaatatagtccgcaatatgcgttgtgatgatcccaatgaccttgctatcagcatcattcgtccattcgcgatgccagtcttggacaaacatccccccgccttgaatccgattgatgaaatgttcttcttctaaatcaccgaccgctcggcgaatggtataccgtgaaacatcgtattgtgccatcaattccgtttcagttggtagtttagcgccaattgaatattgacccgaaataatggcttcttttagcgcttcttttacttttttaaatttattttgcatggctttactccaccaatcaattttaaattgattcgaaactgattgctaattgatgtgatttttaataatttatttgaacacttctagcatagcaaagtttgtcttattttccaatccgtaaacccgctttattaaaaaaagacgctgcagacaacatttcttttgtctacagcgccttcttatgcttatttcttcaaattcaatcctgccggttgttggtcggctggtgtgttgtctgccaatacttgatcatgcgctactgttccggcgtaaatgtcgtccgttaaaacgttgcgacggtgtttgataacccagtaaacatgtaacactagtactgccacgttaatggcaagggccaatgcgctgaccgtcatcaaagcagcgctactatgcgtactttggacagagaattgtgagtccgtcacaaaagcgggataactcatcgtaaacatcatccaaaaagccaatgtttgtgcacgtgcttgtaaccaactgccttttttcacaaagaaagcggctaacgtacatgaaatcaataaagccgcgcctgcgtagaatgagtgatcgccaacactgttataaacgtaggcgaagttccaaacatcataggcgataatccaaggccagatcatgtctttttgtttgtcgtggctgatgataatcccaaaccaccctgaaatcgtaatgatattgatgattccggcaatcccgttcatgatgttccaagcgccaccattcatgacaacgccgtccactaaaccgtgtaagccagccacttggaagtcacggataacggcttccataatgttgaaggccaagatagccggtgggaaaatcaatgcccacttattgtgttgcaatttagggctaaagcgcaacgccataaagcctaaacacccggccaacgctgagtaaactttaacccagtggaaccatgtcccagtactactatcaggtccggccgtcgttggccaaacaaaaatcgttaaaataacaggtagtccgacaaataataataatgctacccatttgttagcccgtgcggcttcgtttaacagcattaaagctgcaacgaccccaatccaaacgagccaatcaatccccgcaatattttgaaataacatataaacccctcctagaaataatagctgtttctatacttctactgtaatcagttccgttgtttttcgatatggttattccggggtgtttgtccaaatttagcgattattatccaacacttgttgcaaagtcccatttagcatccggtgcatccgctgatagaattcaactttcgattcttgcaggttggtcaccaaccattgaataatctgcgtcgcgagcgcccaaccataaaagttggccatttcatcgcgcaaagtcggtgggcaatccggttgcaggtcatcaacgacaccggtgaccatgttaaacgcaacgcggtataaaaagcggcccaataaatcatgattcggggagtgaaatgtatttaaacaaaaatgacgattggtttcaatataacgcaatagcagatccaatcctttggcccaatcctgttctttttgataggccgccagttgggagacaatctcgcggttataaatccacgcgaccaattcattaatatcggcaaaatggtaataaaaggtgttacgcgcgacgttcgcctgctgcgtcaactgattgacagtaatgtgatcgaccggcgtcgttgccattagtaatttcagattttggaccaagttttgtttggtatccatctcaaataacctccacttgatagttacctttagcatcccatatccaccaagcgattgcaatccagattagcggtgaatcagttgcatgaccgaccgagcgattggttgggcgataaacgcttcaacgatgaaagctaaggcaaaattacgcggccatttcgcgccaaaatgggtaatcggcgccattgaaatctgaccactgccaatccaagtgccgatcaccgtcagaaaaatggacattaaaaagacgttgcacaacgctgtaattaacatctgtgcttgaaagctatcggtctttgccatgagatgactggccaagtattcggctggcttttgggtcaataccactaatacaacgacggccacccagataaacggaatcactcgtagcgtggcttgccacatttgccacgaaaaaccaatctcaaagccagtgatcaacggagcaattagattgacggataaaattgaaatcaccgcgataaacagcagtgtttccttaaagttttgtggtaatcttttaacaaataacatgaatattctccttaaatgggcataaaaaaaacagcacaaagtagggtattcctactttgtgctgatcaattatacgcacgtttttttgattaagattaattgtagcaaactttcaaaaaccgcgctaatgttatttgcacttttcagacgattgttttatcgtaaagctatcatgatttacgtaaaggagaattgcaaatgacagtcacaaacgatgctgcttttacagcaatgaccaacggcgaatggtacttcgattcagaagcaacggttcaacaacgtaacgaaacacgcttggcgctacaaaagaccggccaaatcttagataacgcgactcggatggccaccatccaaaaattactcggccacactggtagcgactttttcatcgaaaccggttttgaatttagcttcggccaaaatatttcggtcggcgaccattattatgctaatcgcaacgttttaatctgtgatgaaggccgcgttacaatcggcgatagctgtaaattcggtccgggtgtgtcacttttaaccccttatcacccacttgatccaacagaacgcgccactaaaaaagaaatctctggcgccattacgattggcgaccacgtctggctaggcgctaacgtcactatcttaccaggtgtaagcctcggcaataacgtcgttgtcggcgccggcagtgtcgtgacaaaatcatatccggataacgtgattttggttggcaatcccgcacgcgtcttgcgagaaattcctgctaaataataaaaaaggactgacaaatgtcagtccttttttaggcttcaattgaatagtattcaataatcgcttttaaagctgctgccgcttccgaattgcccactaatttcgtatagtaagccgcaaaatgttgatccgcctcttgcttggcttgttcaccataatttgccatcacttcttgcccatagcgttgatcattttcagcgattgcttgttgtttgaactgttcgaatttagtttggtctgtcatttgagaacctccagtttgattttgaagggtggcatctaactgcgccaaagtcgccgtcaacactgcttgttgcttggcaagttcatcccgtttagccgctaagtgtgtcagccgttctgctggcggtaacgccaataactgctgaatctctgccaagctaaactgtaatcgccggtacatcaagattaactgtagccgatccgcatcctgactcgaatagcttcgataaccattactagcaaccgccggcaccaataacccacgctcgtgataataccgcagcgtgcgctcagaaacaccggtcaattcagcgaaagctttaatctgataattcattgccatccctccttcaaaacccactataaggcctgacgtggcgtgagggtcaagcgccgtttatcatttgttgattattttttgctcaaccaagaaatcatgcgccacatcacgcgctttacggtgtttaacttgaacctggtagttcatctgttgcatctgatcttcagtaatcttcccggctaacttgttgagcgctttgacgacttctggatgggcctttttgaagctctccttcataatcggtgcgccttgataaggtgggaagaagtgccgatcgtcttttaaaacgaccaacttgtaacgcgccacttccgcatcggtggtataaccgtcgaccacatcgaccttgccatccgcaatcgccttgtaccggatgctaggttccataattttagcgtctaatttcaattgatacgtcttcctcaagccttgatagccatctttttgatgataaaaatccgggtcaaagccggccgtaaacgattggttcaaggccgctaaatccgaaatcgttttgacgttatatttcttggcaaaggccgcactgaccgccaagtcataaccattttgatagcgcattggtggcaagtatgccatcttgaattgttcttggagcgattttttagcaagttggtacgttttagttggattctggttggtcttggttggcgatttcaccagcgtctgtaagaccgtccccgtaaattctggatagatatcaatttgatcggccttcaacgcgttaaataagaaggtcgtgccaccaaaattcggtttaaccgtcacatcatattgcggatgatcggccaaaatcagatcacgatacatattcatcaagatttcgggttcactgcctaacttgccggcaatcgtaattttagttggtgccgcttggaaccgtgtcacaccttctacgagaccaaaaagccccacaaaaatggccaagctaatcgtaatctttttgaaagataatgtgcccaaccagcgaatcagcgcgctaaccactaacgccaaaacagccgaaagcgttgccccgactactaacaaggcgttattattcgactgaatcccgaccaggataaaggtccccagaccgcccgcgccaatcaaggccgccaaagttgccgtcccgataatcatcaccagcgcaatccgcagacccgaaataatcagcggcatcgccaatggtaattcaatgcgtaataagcgcttcgcacgtggtaaaccaaaagcaatctccgcttcttttaacgccggatcaatcctgctgagtcccgcgtatgtattttgaaaaatcggcatcaatgcgtacaagactaacgtaatcaccgccggcaccgtaccaatccccaccagcggaattaataaccctaagagcgctagcgacggaatcgtctgcagaacacttgtcacttgtaacatcgcttcggcgagtttttgatgagcggttaaaataatcgcaagcggaatcccaatgaccgccgcaattaagagcgccagtaatgagatttccagatgttggccgagcgcttgcaataattcgcccgattgggtcgttaaaatctgctgaatctgttgaatcatcattaaagcccccgtttcgcaatgagcgtcgttaaatcagtcgtcgtcaattgccgttgtgtttggtcatcaagtgccacgacgaccccttcaggttgtgcgattaaggcttgggccaaggctttgatggacgctgtagtggcaatcgtttccggttgcccgctaacaacggtccccaaatcagcggccactaaatcttgcaccgtcaatgtcgttggttggcgttcaatatcgaaaaattcacggacaaagtcgtttttcggttggttaaaaatcgcttcggccgttccaatttgttgaatgctacccgcccgcatcaccgcaatttcatcccctaaacgcagtgcttctttcatatcatgggtcacaaaaacaaccgtattatgcaattgcttttgcaaatccaatacgagatcttgtaattgcgtgcgcgtcacagggtcgagcgcactaaacggttcatccattaaaatcactttcggtttggtcgccagcgcccgaataatcccaattcgctgttgttggcccccagagagttcactaggatagcggttggcgtatttatccggatctagattaaccagcgttaacagctcccgagcgcgcttttggcgatcagctttagaccacttcaaaacttcaagttgaatcgtaatattttcttcgattgttaaatgcggaaaaagggcgatattttgtaaaacatagccaatgttaagtcggagggtctgcaaatccatttggtcaattggttgaccatcaattttaatcgtcccactagttggttcaatcaaccggttgatcattttgaccgaggtcgttttcccgctaccactagggccgaccaagacaaatagaccattgtctggaatggttaatgttagaccatctaacgcgcggctttgcccgtattgtttggtgacaccttcaaattcaatcatgcgctactccttttgccacttaacgatttgttagttcattgtaccacttagaagaaggccaaccaattgacgtgcttgggcccgtcaatcttatttttttgattcacttttgcactgtgctacgatgaagccaaagcaatcaattgaggagggtttaatatgaaaacacattttgacaccatcgtgatcggtggcggccctggcggcttagcggcggcttatcgtttggcggaacagcagtccgttttagtcgtcgaaaatgatttatggggcggcacctgtcccaatcgcggctgcgaccctaaaaagatgctctactcggctgttgaagccatcgaccaccagcacaccctgcaatctagtggtttagtcggtaccagttacatcaactggccccaactcatggctttcaagcgccaatacaccactcaaattccggacggcactttaaacggtctgcaaagcgctggcattcgaacagtaaccggcaccgctcactttatcgccgaccaccacttgcgcgtcggtgaaacggattatacggccgaccacttcatcatcgcaaccggtcagaccccaacgctccccgcaattgaaggacgcgatcttttacagaccagcaatcaatttttagacctggatcacctccctgctaaaatagccttcatcggtgccggttatatcgccatcgaattagcgaatatcgccgccacagcgggcgctgaagtccacatcattcaacataacaagcggattttacgcgatttcccagaagccatgacgaccgaattaattacgagcctcgaaaataagggcgttcagttccatttcgaaacaacggtcaccaaagtccatgagaccaccaaaggcctcgtgctaaacaacgcagagggcttcacactaaccgtggatgccgcttttgccgcactcgggcgccacgcgaatatcgatcaactcaacttgcccgcagtggacgttgccattggccaccacggtattcaagtagacgatcatttagtcagcagtaacccgcgggtctacgctattggcgatgtcgttgatcggccccagcctaaattgacgccagtcgccggctttgaagggcgctatgtagccaatcaacttctccaaaccaattcagaccccattgcgtatccgctcattccacacacggtttacgctagcccccagatttcacaagccggtgtttctgttcaaacggcgcaagaaaaccccgaccaatatcgacttaaccaacaaacaaccactaattggtacaccttcaaccggattaaggaaccaaacgccatcgtgaccacgatttttgaccgccaaaccaaccaactcgtcggcgcggcagcctacaccacgattgccgaagaattgatcaattatttgacgcccctcattaaaaatcacacgaccgcggctgaactcaccgatacaatctacaactacccaagtcccgccagtgatttgaaatattactactaaaaaagtgttgaagaccgattgggccttcaacacttttttaaataacattttcttttttcgcttttccctgtaaccatagattaaaggccagcacaatcaccaagagcactgtcgcaatcaacataatattgtgtaagccttggtacataatcgcgcgcattgccggtaagaggtgcgctggcaattcgtgcacgcgttggaggttgctcaacttgttcatcatcgccatcgtgattttcccgtgtgatttggcaatcccttgcgttaaagcatggttcaaaatcacgccgtaaatcgacgacatgaacgtttgactcagaatccgtaagagataggcaaaggaggtcgcaatgggcacatcgcgcgtctcagcgtcttcttggacactaatttgcaagacgttaaagctcatcccaagtccgaacccttcaaaagcgcccatcaataataaaaaccaaaatggtgcccgatcgcccatcattaacatcccactaaaggcgattaaaaaagcaaccgtccctaatgttaccacgcggtgtttccctaagcgcggttgaactgccggcccagccagcgaaccaatcaagttggtgaccgcgcctggaatttgcgtcatcccgccgagtaacgcactcaagcctaataacccttgcgcccacattggaatatagatgttaaacgcgataaatgcgccccataaaacgacgaataagataaaatcagtcaccaattgcggatttttaaacaaccggttcggtacgattggatcggccgcgcgatcttccactcggtataagacaactaacaaggccagacctgcgacgattaacccaataatcaaggtcaatgagccggtcccaatcatttgaatcccggtcaataacgtcaccaaactggtaatcataatgccggcgcccaagtaatcgacgctaccacttagatgtgccttaggttgttctttgaagaaataacgtacgcagagaatggataccaatgcgattggcacgttgatgtaaaagacccagtgccaactaaaggtatcaacaatccacccaccaatcaatggcccgacaatcgaagccgcactataactcgcggtcgcgtacccgataacttgcgcccgcttgcgcaaatcttggtataaatcagcataaatgatgaatggcaaggtgttcatcccaccagcgccaatccccataacggttctagcaatcaggaagaaaacgatgtttccagaaaccgcctgaaaaattgaactgaccgcaaacaataacgttgccaattggtaggcccgtcgattgccgatgcgttcacccaacttactccataaaggtgtggccaccgccatccccaacaagaagaccgccacaatccagcccatatattgaatcccgtgcaaatcactaatgattgctggcaaggccgtattgatgattgtcccatcaagccccgccatcatatttgataataataatgccagtgttactaaaagtgtattcttcttattcactatcaacttactccgtattttctgtttttacttattatagtataagctatctcaattaacgaccatccttcagccgctcaaccacttttattatcatacaccttcaagttgacttgaaggcaaacaaaaaaggccccctttcagagtcctttttcaatcggctacaatgccgtgtgggcttcaattatttgccgcacctttttccgttccttttcaaagcgccagtgaccgttcattccggaatagtgcattaattggctgagatgatagcctgctggtaaattgccttccagagccttataaaccttgctgcctaaagcaattaaggttgctgattgtggaataccaaggtccttcaagtgatcgagtaaggctgttacattggcctggtccaccttaaccttgctggagtcactttctaatgacccttccaaatccgtgatgaaaccaccccacgcagcagtaccgtaagtaatggctgctaatcgatagtcacaacttttgcgatcaccgtggaagttcccgaataattctggtaatgggcccgcatcgcccgggttcaacccgataaagacgtattgcaccgcactcaatttttgatctaaggctgctttatcaatgtcactcgggaaacctggttcataattttctttgaataacggtaaaatggcttcttccggcgttgcgtcattcaggtcgcttggaattgaccagtataaccaactatcaacggctgtatattttgtcatttagcatcacgctcactttctatgataattataaaaaatgattgcgacacaatatgtcacttcgaaccgtttttgagatttcgggttaaagattttcgcgcgccgctatcatctgttcgataaattgcgcaatagtctcaacttcggcttcggagtagttggctaaaacagcttcatagttttggcgttgccgttgatgtaattgatgatgcagctcaccgatttcttgcccgcgggccgtaattcttagtacgacggctttttgattctccggcgtgtgaaatttttcaaccaaccggttcttagcgaggcgctgaatatagcgcgataacattccttgcgataattcggattgcgcctgtaactgcttaaacgggattgcttcgcccgcctgtgccagttgcgtcaaaattgccaattccgaatgcgtcagtttcttggcttgggccatcatctccggtgtattgttggcctgtaaatgctgcaatagccaatcgcgctctgaatcttgatcattttcagcgtgtaatttggcgatcatttcttggagttttgttaatttagacatttttaattacctgtaatatatctgttaacttttattaatttaggatctatactaattttacattacaggtaattaaaaaacaagaatctttcatttttacaattaaccgggtcatttttaccccaatccattaccggtaattaatcctataaaaaaagaggtttttaatatgaaagcagcagtcgtaacagattttaaacaagatcctaaatttgataaccaatttccaacaccaattcttaacccagatgaagtcctcattaacgtgattgcctcatccctttccaatcgggcgcgctccggagcagccggcagccactacacttcaacggaccaactaccaatgatccccggagtcgatggcatcggcactttaccaaccggcgaacaagtttatttcgccagcgaaggtacttttgctgaacaagtcgccgtcaaaaaaggccactgggtaacagttcccgatggccttgatgcaattaaattagcgggcatgatgaatcccgcgctttcttcttggatggccctaaactaccgtgccaattttagtgccggtcaaaaagtcatgatcctgggcgctaccggtaacgccggtatgatggccgttcagattgccaaacgcttaggcgcttcagaaattatcgccgtcgccctcaatacagagaaactcaagacactgaccgacttaggcgctacacaactggtcgatctctctgcagaacccgcacaacgcaatgctcaactcgctaaagccggcagtgacgttgatatcgtccttgattatctttggggcgacgttgcagcaaacgccatgaccgccatcatcccccaccgtcaaaatgccgaacaacttttgcaatgggttgaaatcggctcatctgccggccaaaccgcacccattccaggggctggcttccgcgctgtcgctttaagcttaattggctccggtcagggttcagttgcgcctatcgatatgatgaaatccttgaacgccattttaaccgctgaaaaagaacaaccttttacttttacaactcggacactgccattatcagatgttgaagctggctggcacctccctggcaatgaacgcctcgttttcactatctagtcggtccctcgcaccacagcatcgcgccgcatacgaatcccgtattccgccaagccaattacaaccgcaatcgtcaacagaatgaggagactcttccaatcttgtttcaagattaataaatctccagcaaaagcgtaaataaaagcaacgatcgtcgaaccggctaaacaagcccagctttgtgctttagccgttaaatgcgtatcaccggcggctagattcacaaaagcagttggaatcattggtactgcataaccaatcaagacgccgactgccggatgccgcattttaactagcgcacgataaacgcgtgaatccggctttttgtggcggcgatcccgcactctggccaataactgcacttgcagtaaattcccgagcgttaaaccaatcgcattaacgacaaagccgccccaatgccccagacaaaccccgacgagcatcgcaaccgctgaagtcggcgcgccaggaatcactgtcatcacgaccatcactaagccaaacaccaagaacgcatatggccccagatgacgaatatccaacacatattgccgataatcctgccactgcgctaaaaaggcaatgaccgtcctctgatggcgccaaccaatcaataaaacaatcagcgctagtaagatgatacttaccgccagtatcagccgcttttgttggtgcgccgtcatccgatgacaccttcttttaagtaatgctcaatcgtcgtcaagacaccatcgtgattatgatccgctaacgcaatgttagcggattgtttttttatcgactcataggcattaggcatcgcaaaaccccacggcgtcatcgtcagcatccccaaatcattttcattatccccaaaagtcatcaattcatcatcggtaatttggtaacgcgtctgtaattgacgtagaccgctcactttatccacaccaacattaccaatcaactccgtttgaaatcccgaattctgactcatcaaacctgccggtaaggagccccgtaactgctgaaccgcctgtgaataatcaacatccggcccaaacgtgatcccgactttagtaatttgatcgttgactgagcgccccgtcaactgatcaaaatgatcgaccaacgtcaccgcatggtaatactgtttaatgattgctagtgtttcgggtgaagcctgtcgcggcacatacgtttgagccaacccagaaattgttttttgcacaattgtccccgctggaaagcccttcgcaattaacgctaacaacgcttgtaaatcatcatcagccaatgcatctactcgcagtaaatcatcaccatgatgcacaatcgccccattttgagaaatgaaatctaacgactgacgatacggatcaaattgattttgcagccgttgatattgcgacccactagcgaccacaaacttaacttggcgtgcttgtaacgcctgaaaaactcgcgcaaaccgcgcctgattatattgattattctggtccaaaaaagtcccatccatatcaacaacgatcattttaacacccatgatgaaaacctcacttttattcaaagtcacttattctaatctctttagtataaacaatcatagataaacacaaaagatgtatttaagtaatgataaaaatactaccatacttaagacaactaaagcgtttcaaacgcacttttttagtttaaataacattttcaatttcgtcagaatcattacggagaactttaccagattgtaagtcatcaatttcgggcactttaaagccttttttctcaagtttgttagtgatcttcttgagaatttcgatgtctaagccactaggaagtgtgaagagtgtgcgtcgaacgaattcgtcttgtttggcatctaaggtcatgcagctggcaatcgacgtgtatttggcgataatcttcgacatggcaactaaatccccttgttcaccggcagaaaggaccgtgagcacataactactaagttctaagttccaagcttctgaaagcatattaagtagagtgctatgcgttaaaataccaaagaagttactgtcttcatctaatacggcgatgtaaggtaaatctttgatattgaagaagaccttgaaaaatggcgcatcaactggaatgtatttcgtcatattcttcaagaggcttgtgacgggcaattgcatgtcgcccccttgagatttatgtcggtagatgtgcattttataaatattaccacggaaaattttaccgctggcatctaaaacaggcacacaacggtaaccagaatcttccaaaatcgttagggcttcttcaagtgtcacggattcttcaatcgtggtcagacgttctttgggtaacactagggatttgattaacataagcatttctccttagattaaaattctctcatatactgatgtaatcatagcataccattgacgtaattaaaataactagtttttcgacttggcgaaaaaacaattaaatattaatgagatttaaaaaggtcctaaaaagacaatcgcatgaattgctttttaggaccttttttaagttgttttagatgacgaccactggaatcccttcactaacggtattgtaaagttgggccataattgttggtggggtattgatacagccatgtgagccatgttctttataccaagtgccaccatatttaggttgccatggtgaatcatggataccgacacctgtttcatcaattggcatccaataattaacaggacttgcatactcactgacaccgtcaaagttagtgcctttgagcgtggcgtttcgttctttcttccaaatactccaaacaccacttggggttgtttgaggtggtcgtgctgtgacgacgtctgtttggattgttaccttgccattttggtagagccacatatgttgggcctttttatcgatctcgatataagttgaaccaacgctgcgatctttttgcgtcatcccagaaccacgaataacagcagttctagagaagtctttaccttcagggacttctttcatgagggcgctaatttcatctgcaggtgagatgctccaaccgtaaataccggcaggcacagtaactgttccttgtttcgttgatttaaaggttaatggtttatcataagtatcgtattttgtcttgagttgataaacgtaattagaaacggcagttttatcaagtgacaccgcaccgttgttattaactaaccaaccttgaatggtggccttagggactgtgaattcattaccattaacggaataatgaattttttcatcactgatggtcgtcattttcttagccgttttttgaagcgctgaatcggtcgatttaatagttggaacggtatagtcttgttttaaatcaatggaggttttaccttgattgattgctttgttaattgtttttccaaattgtgcttggtcgatttgattaccattgacttctttaacgatctcaaagtttccattaactaacttaatcgttgcattcttagaagctgttcgaccagtatttaatttagcaactgtctgatttgcgaattgtttaaaagtttgttggtttaaaataagggcattttcagactgcaattttttaggattgcttaattgatgaccaagccaagaccagccgttttgagaagactgaatcttcttcaaaagcggttggaaattatggctaaaaccagcatcctttgctgtaaatgataagcgggtcgtttgatcttcttttaacgtgaatttctggtggttaacttgcttgagtaatgcttcattagcttcggcaggcgatttaccactaatgttagtgccggcaacaactgtattgggtaaaaatactttgttgtagtggagactcatggcagaataaccgccgattaaaataacggctgcgacgcccaaagcggtataagctttctttgaaaccttcacaacatcaactccaatctttctgatagattaatcataccctaaatagtttttaattacaaaggacgttaactaatagtaagcatactagaaagtgagctaaaaagaaatgcgaaagcttgattattagataactttaaggaacaacgaataaagggcttaacaatctaatgttggcaggcgcacttattaaaatcaaatgaatggttgttacaagaaaaaatggtcttggtcgttatttcagatgaaactaatgactagataagcgccaacaaagtttgtgaagaaatttcgaatggtaagataaaaactaaataaagatattaatagtattaatattttgtgttaatattttaacagttaactattgtcaacgatatgggattgcgatatgataagtgatattaacaatattagaagggctctagataagtggtttgatgattttgataggtttaatatttaaggatttttgaatggaagtagctgtgaatgaaatatagaaataaatttcaagtgttttaatcataatttatattttatacataggtatttcggtaactaattatcggggttgaccaaataattaaaattataatggtatacgccgtatacgtatatcaaacatattaaaacagctattttacgtaggaggtaagatagtggtcggtaaagcagatacaagaatgcaattattaggagaatggtactcaaagctacaacaaatcgcaacaaaggtaaatgcaattagtcgcaaatacgatgttagttttgaacaatttttggtgattgaacaaattattgaagaagaaagaaaatcaccaagtgaactcgctgttttctttaaaacatccttaccagcagtttctagaaaattaaatctcttgcagtctaagcgattggtttataagattcgtggcgaacaagatgaccaacgattaatgcgcgttaatgcgactcccgagggcattgaaacctatgaatcaattaaggcggaattactcacttgggacgcacagcttaaggatcatgatattaatttgatggcgatggtcaatcatacgttggaacacgctaattaaaaagagacattaaaaaaggggtcagggcaaaaattaatttgtcctgatccctttttgatcagcaataatcgagattattggcgagtttcgatatctaattcttcaaaagcttttgtaacgatatcttttaattgttttgcagatttgtgcatgctttccatttcgtggtctgtcaatggaatttcaaggatgttagtaatacctgaacggttgataacagcaggtgaaccgataaagatatcgttcaagccgtattggccatccatgaatactgataatggtaagacagcattttcgtcatctaagatagccttagtaatacgagctaatgcagtaccgataccgtagaatgtagcaccttttaagttaatgattgtgtaagcagcgtcgcgaacactttcgaagatcttaacgagttcttcttctttaacttctggatgagctttaacccattcagaaatcttgatgccaccgatgttagcatgtgaccatacagggaattctgtatcaccatgttcacccatgatgtaagcatggaccgaacgtgcgtcaacgttaaccatttcagcgatatctttacggaaacgagctgagtcaagtgatgtacctgaaccgataacgcgttccttagggaaacctgataatttccatgtagcgtaagttaagatatcaactgggttagcagcaactaagaagataccgttaaagcctgattcaacaataggatcaacgattgtcttcaagattttaaggtttttgcttactaagtctaaacgtgtttcacctggcttttgtggtgcaccagcagtgataacaacaacgtcagcatcttttgcatctgagtattcagcagcatagattttcttaggagaagtgaaagctaatgcatcagataaatcgattgcatcaccttgtgttttttctttaaagatatctacgataccaacttcttgtgcaataccttgtaatgttaaagcataagcgtagctagaaccaacagcgccgtcgccgacgaggataactttttggtgatctttttcaatgtttgccaatataatgacgtcctttctgtaaaacaattcttcatttcgaaaaccagtatagcataatttgcatgaaagttcgctaattttgtttaaattttcagaaaactatttatttcctaatatagaaagaaaaacgggtatggtataataaacagcaataacaaacgtcgactggggagagcaacttctcagtatttttgcgttataacggcgattttgaagaagaggtaagacaaatgaagatgattgttggtttggggaatcctgggagtaaatatgcaaaaacaaaacacaatattggctttatggtaattgaccaattatgtgaaaaatacaacgtaacactcaataaacatgattttgaagcagaatatggcagcttcaaatacgaaggtgaaacagtcttattagttaaaccactgacattcatgaatgactctggtcgctcagttggcccattgatgagttactaccaagttgggattgatgaattattagtcatccaagatgatatggatttaacgatgggcaaattacgcctccgccaaaagggttcagcaggtggccataacgggattaaaagtattattgcgcacacgaagagccaaaccttcaagcggcttaaaattgggattcaacatcctcaaaaaagtacggtggtcaattgggttctaacaccatttgataaagatggcgcaccagtgattaatcaagcgattgatcaagcctgcgaagcaatcgacgattggtgtcaaaacgatgattttatgaagacaatgaataaatttaattagagtgcttttagtgcttgtttagattttgagcactagcctagtatcgtgaataatcggtgcaaccgattgtttacgatgcgtagctaggcgcagaaatctagcactaatggcacgtttaaaggccgtatcgcccatttctaccagtcacaaaattcaagaaagtaagggaccttttgaatggatttaatttcaatgttgggtaacacccagcaagtgcaatccgtattagaaaatcaaaagccaggcgtcagacaactgcttacgggcctttcgggctcagccaagacgctttttttggcaacgatttataaacaacagcgtcagccgttattaatcattgaaagtaatatgtttcaagccaatcaggttgctgaagatttagccaatcagttaaatggggaccagatttatacctttcctgttgaagaagtgatggcggccgaaattgcagttagttcaccggaatcaagagctgaacgtgtacgaacgttgagctttttggcgacgggtaaaaaagggattgtcgtgacgtcagttgcaggaatgcgacggttattgccaacagcccgtcaatggcgcgatagtcagacccagattgaaatgggcggcgaagtcgatccgaaaattttaggcgcacagttagccgaaatgggctatcatcgcgataaattagtcggtaaacctggtgagtttgcaatgcggggcgatatcattgatattttcccccttgatacggaaaatccagttcggattgaactgtttgataccgaagtcgatgcgattcgttcgtttgaggcggatacccaacgaagtattgaaaacctcgagagtgtcgctatcatgccggcgactgatctattagccaatgcggcacaactcgaaatggccggagaagcattgcaagccgattatcaacaaacagcagccaagataacggccaaagatgatcaaaaggcgttagccgtgaacttcgaaacgccgattagtcgattattggcaggcgagcgcttggaaaacttagcactcttcgtcgattacctttaccccgatcatacgagtctaattgattactttaaaaacagcgggttagtggtttttgatgattatccccgcattcaagaaacacaacgcgtcttagcggaagaagctgctaattggcagactgacatgttgggcagtcgccgcttactaccggcacaaaagctattagtcgatgttcatcatttaatgaagcaagaccaacatccgcatttatacttatccttattccaaaaagggatgggcaagctaaaactagatacgctcggcaatatgccaacccgcaatgtacaacagttctttagccaaatgccattgttaaaaacggaaatgagcaggtggcaaaagcaacaacaaacagtggtcgtcttagtatcagatgccaaacgagtgaagaaaattgaccaaaccttccacgattttgagattgaagcgacggtcacgactaaaactaagttggtggctgggcagattcaaattgttcaaggctcattgcaaaatggctttgaactaccagatttaaaattagtcgttctgactgaaaaagaattatttaataccgcaccgaaaaagaaggtgcgccggcaaacgttagccaatgcggaacgcttaaagagttatagcgaattaaaaccaggcgattatgtcgttcacgtcaatcacgggattggtgaatacgtcgggatggagaccttggaagtcgacggcgtccatcaggattacatcaccatcttgtaccgggataatgggaaactgtttattccagtgacacagttggacatggttcaaaaatacgtctcggctgaatccaaaacacctaagattaataaattaggtggggcggaatggcaaaagactaagagcaaggtttccgctaagattgaagatattgcggatgatttaatcgaattgtacgcgcaacgggaagccgaaaagggttatgcctttcctaaagatgatcaactacaagccgacttcgaaaatcagtttgcgtatccagaaacggatgatcaattacggagtacggccgaaattaagcacgatatggaaaaagtacgcccaatggaccgtttgttggtcggggatgttggttttgggaaaaccgaagttgccttgcgcgctgcgtttaaagcagtcgcagccgggaagcaggtcgctttcttggtgcccaccacgattttggcgcaacaacattatgaaaacatgctagcgcgatttgcggattttccagttgaactcggactgttatcacgatttaaaacgcgtaaagaagtgacggctacgcttaaaggcttggaaaaagggcaagtggatatcgtcattgggacgcatcgtctattatcaaaagatgtcgtcttcaaggaccttggcttattaattgtcgatgaagaacaacgatttggtgttaaacataaggaacgactcaaacaattaaaggcgcaagtcgatgtgttaaccttaacggcaacgccaattccacggacgttacacatgtcgatgttgggtgtgcgggatctttctgttattgaaaccccaccaactaaccggtaccccatccaaacctatgtgatggaacaaaatgctggtgcgatgcgagaagcgattgaacgggaattggaacgcaatggccaagtcttttacctgcacaatagggtcagtgatattgaacaaaccgtcgatgagattcaagcgcttgtgccagaggcaaccgtcggctatgcgcatgggcaaatgacggaggcccaactagaaggggtcatttacgactttgttcaaggtaagtatgatgtgttggtcacaaccacgattattgaaaccggggttgatatgcccaatgtgaatacgatgattgtcgaagatgctgatcactacggcttatcccaactgtatcaattacgggggcggattggccggagtagccgggtcgcttacgggtactttatgtataaaccggataaggtattgaccgaagtcagcgagaagcgtctgcaggccattaaagactttactgaattaggttccggcttcaaaattgcgatgcgtgatttatcgattcgaggcgcaggtaacttattaggtaaacaacaacacggctttatcgattcagtcgggtttgatttatactcacaaatgctcagcgaagcagtcgccaagaaacaaggcaagaaagtggcggctaagactaacgctgagattgatttgaagctcgaagcttacttgccggatgattatattaatgatcaacggcaaaaaattgaaatttacaaacgaattcgccaaatggatacggaagcggcctttacggaaattcagagcgatttaatcgatcgcttcggggattatcccgttcaagtcgcgcatctcttaacgattggccaattaaaaatgaatgccgatgatgcgttaatcgaaacgattaaacaagtcaaagacaagattcaagtcgtcttatcaccaaaagggagtcgcttagtttctggtgaacagatttttgaagccttgtcagcaactcgcttgaaggcaacggtcggttttgaacaagaaaaattaagtgtgacgttaattatccaacctaagatgaagactggcgattggttacgtgagttggcgatttttgtggaaacactcgttgaaatcgaaaagaagcagttggtaaaataaccgctagttactggtagcgattatcggagggattcgatgcaaaataaacagatgcaacatttaatgaagggcgcagttgtcttatcaattgcctcctttgttgccaaaataatgagtgcggtctatcggatcccatttcaaaatatggttggcaacaccgggttttacgtttatcagcaagtttaccctatctatgggattgggatgacgtttgcgttaagtggtttcccagtttatatctctaaaattgtggctgaggaaacggccccggctgaacaaacacagattttacggcgatcttttgcgctattagggttattcggcgcactgatctttttatacctgcaatatcaagcaccggcaattgcggtggcaatggcggatgctgaattagcaccgttaatcagaatggtgtcatacatgttcttattgatgccgtttttggcggttacgcggggttatttccaaggcatcttcaatatgattccaacggctacgtcacaagtggccgaacaacttgtccgggtggttgtcattatcctagcagcctggttgtcactgaagctacactggtccgtttatgaaatgggaacctgggcgatgtccggcgcctttttcggaggcttggtagcaacagttgccttattgaaaccggcggaaaaagccttcgtgctcagagggacaaaaccgaagggcattaacctaggtgcgtaccgttcattggctaaacgcttattaatagaagggggctcaatttgtctgtttgcttcattaatagtgttattacagttggttgattcattcacggttaaaaaaggcttagtggccagtggcttaaccgaggattttgctaaaaaccttaaagggatatttgaccggggccaaccgctcgtgcaattaggcttagttatctcaatggctttttcatcgacattgattccaagtctttcgcgggcacggcaacaacagcaagaccatcaattccaacaagtcgctgaatcattgattcatatcagtttaggcctctcggcggcggcaacgactggtttgatgattctcatgccacaagtgaactacttgttgtttggggatgcagatgggaataaagccttagtgtggtacatgctaagtattgtcattattgcgctaatcaatgcctgcaatagtgttttacagagtttggatcagttccataagacgacgattgcgctattaatcggccttttggtcaaagtggtcattaatcaatggttggtacaacacttccaaattgtgggcgcgagtgttgggactgttattagtttaggggttgtgttagccttaatcttacggcaatcaccagaattggtgcgagatgccttggacggccagcattttacaggtaaattggttttgatctgtggcatcatggctgtagcggtccgctttgtggtaaccgtcattcaacctagtctggtctcaaggggccaagccgttttaggtgctggcgttgggattgcagtcggggtacccgtctttatcagccttgctttagcgtggcaattattctcaattcgagaatggttaacgattccgggtggtaaacagttgctgaaactagcacaaaaattaaaaaggtaggcgacactaatgagattagataagtttttaaaagtatcacggattattaaaagacgttcagttgcaaaagaaattgcagataaaggtcggattttaattaatgatcgtcaagcaaagtcttcaagtaacgtcgttgttggcgataaattggaaattgggtttggtaacaaaaccatgattgtcaagattacgcaaattatcgaaacaaccaagaagagcgatgcggcagaaatgtatgaaatccttgaaactaaggttgcagaaaattttgaataaggtcttttaataggcgatattagtggtttagtccaatttgttaaggataatcactaatatcgcctattttcgtgatattggttgacgttgtttttattaacttgctataataaagggattacaaccagtgattggaggggctaacgtgagtcgtaagataacgcaaattgaaaatgcctatacgaaacagcaggcggctaaacaaaaggttgaacaaaaatcgaaacggacacggacggttcataagcgtcgcttattagcgttgggtgtcattgcgttaattctttttagtgtctgtggtgttcaaatcctgcaaacccaccattctctggcattaattgagaagcaaacagttgttaaaaaacaatccttaaaaaaggccaaagccaaagaagcggatttaaaagtacaggtctctcagttacataatgatgactacttagccaagtatattcgctacaaatattattattcaaagaagggcgaaacaatctatagtttgcctcaagataaggcaccaaatttaaacgaacaacaaaaataatttcgttttacagccttgtttcaagggtaaagcgtgctatacttattttattaaatatcacaagtttgtgattaaaagtttgacgagttcaaacgaccatttaggaggacgtagttttatatggcagttgaagttggttcaaaagttcctggtaaggtaacaggtattacgaattttggcgctttcgttgatttaggagaaggcaagaccggattagtccacatcagtgaagtttctgatagttatatcaaggacattcacgatgtcttaacagttggggacgaagtgactgtgaaggtgatgtcagatcaaaatggaaaaatcggattatcaattcgaaaagcggttgatcaacctaaggtgcaagagcatactcggccacaatctagtcgtccaaataacaatcgcggtgggtatcgtaaacctgaacatacaagtgcgcctaagaaggaaggctttgacgatttactatcaggcttcttaaaagatagtgaagatcgtttgtctactattaaacgcaatacagaaggtaaacgtgggggccgtggcggtcgtcgtagttaatcaaaaatcatgatagaggttgggttgaaagtttagtgaatagacttttggcccaacctctattcatttgaaggagggttaagatgcttgaacaagcttttcaaaacgaaatacggcgccaccagttttggccaactggcgcaaaagtgattgttgcgacatcaacgggagttgactcgatggttttattgacgcttttgcaacgcctaccgacagcgcttaaacctcaattgattgtcgcccacgtcaaccatgagttacggacggaaagtgtagcagaagaagcgtatctacgacaattctgtctggaaaatgacttatcactgcaagtggcgcattggccgctacaacaacacccgcaaacgggtattgaggcggcagctcgagagtttagatatcaattttttgaacacttaatgaccgctgaaaaggttgattatctcgtgacggcgcaccatggggatgatcagttggaaacactgatgatgaagtttattcgcagtggtgaactgcacgaaatgcgcgggattcaaagtcaacggccatttgctgacggcacgttgattagacccttattgccatttgctaagcaggatttacgcgactttgcgttagccaataacattacgtcctttgaagatcagacaaactatgagacgactgtcttgcggaatcgggtgcgccatactttggtcccttttttaaaacaagaaaatggacaaatcttgcaaaatgcgaatcgcttcagtcagcaattgacagccttattggggcaacaagtgcaattgacgatgacattattaccattactagatttgaaggttacagacaaagttattagtggacagctcaaggcgattaaaacactacctacagcgcaacaaacagccatctggcaactcatcatcaaacagcatttcccccaaattagtccgctaaaggaaacccaactgcaacaactcaagcaattgattcaatcaacggttaaaccacaaggtcagttggcccttggtcagaggattttgtttaccaaaatctatgatcgcttccaaattggtgaaacaactattggtgagatagccgcgaaagacgaaaaaagtcgaacgctaatgctgaataagtggtgtgtcttgccaaataacgaacaaattggtatttttgagattaatcatttgccccgtaaactatcgggccaacaattaatttggttagcagatgagcaatggccaattgttgccaaaccatgccagttaactgatacaattatgattgataaaacccaccataaaacacttaaacgtctttttatcgatttgaaggtacctcatgaaaaacggcagaatagctggggtatctggtcacaagagaccctggttggccacccagaatttcgaatttcagcattgtttaatcacgaacaaactggtaaaatacggtacgtactgtgttatataagtgaataaagaacattcaggttttactaaaaaatggaggctagctcaatgttagaacaagatatcgaacgtattttatacacaagagaagacatacaacgcgtcaatgaaaaattgggcaagcaaattacggcggattatgaaggcaaaaatccgttgatgattgggattttaaaaggtgccattgttttcatgactgatttaattcgggaaattgatttgcatgtcgaaatcgattttatggacgtttcaagttacggtgaaggcacgatttcatctggcgaagtgaaaatcatcaaggatcttgataccagcgtacaaggtcgcgatattattatcgttgaagatattgtcgatactggtcggacgttgaattacttgatgtcaatcctcaagacgcgccaagctaattcgattaaagtttgcactttaatggacaaaccaagtcgtagagttgtcccagttcattcggattatgttggcatggaagtgccaaatgaattcgttgttggatacggtttagattatgccgaacgttaccgtaatatgggaacaattggcgttttgaaaccggaaatatattcgggtaaataaatggtcaatgaaagtcagatatgttatagtttaacagtgtcaaaaggacacagtgtcacaaatgatgagaagcttcaggaggtcacgtatgaacaacaagaagaatagactgttcagtaatagtctgttttacattattatcctagtggctttagtcggtgtattttcattcttcatgaatggcaatagcggatcagagtctaaggaagttcaatcaagtacttttttaagtgaattgaagacggataaagttaagtcgttctcaatccaaccgacaaatggtatttataaaatttcaggggaatatcgtaaagcacaaaaagacgaacagcctaagtcaacattttttggttcacaatcaaaaaataagaaagtgacacactttacaaccactttattacaaagtgattcacaagttagtgccattacgaatttagctaaccaaaacaaaacaaagattgaaacaatgcaagaaccacaatctggttggtgggttagcatcttaagcctaatcttgccactaattattatgttcggtttattctacatgatgatgggtcaagcaggtcaaggcggtggccaaggtggccgaatgatgaactttggcaagtccaaagcgcaaaaagcggataagggtgcgaataaagtacgcttctctgacgttgctggcgctgaagaggaaaaacaagaattggtcgaagttgtcgaattcttgaaagatcctcgtaagtttgcggcattaggcgcacggattccagccggggtattactcgaaggacctccaggtactggtaaaacattattagcgaaagcagttgctggtgaagcgggcgtaccgttcttctcaatctccggttctgatttcgttgaaatgtttgtcggtgttggtgctagccgtgttcgtgatttattcgaacaagctaagaaatcagcaccatcaatcatctttattgatgaaattgatgctgttggacgtcaacgtggtgccggtatgggtggcggcaatgatgaacgtgaacaaacattaaatcaaatgttagttgaaatggatggtttctcaggtaacgaaggcgtcatcgtcatcgctgctactaaccgttcagatgtcttagatccagccctcttacgtccaggtcgttttgaccggaaaatccttgtggggcgtccagacgttaagggtcgtgaagccatcttaaaagtccatgcgaagaacaaaccattagcagacgacgtcgatttaaaagaaatcgcccaacaaacaccaggttttgtcggtgctgatcttgaaaacttattaaacgaagcggcccttgtggcagctcgtcgtagtaagaaagatatcgatgcttctgatgttgatgaagccgaagatcgggtaattgccggtcctgctaaacgggatcgtgtcatcaatcctaaagaacgtgaaacagtggcttatcatgaagctggtcatgcaattatcggcttagtattaagtgattcacgtgtcgttcggaaggtcacgattgtgcctcgtggtcgtgctggcggatatgccatcatgttacctaagacggatcaattcttgatgagtaagaaagaattaacggaacaaatgactggtttaatgggtggtcggacagctgaagaaatcatcttcaactctcaatcaaccggtgcttcaaacgatttcgaacaagcaacagatattgcacgtggcatggttacccattacgggatgactgaaaaactaggaacagttgcgcttgaaaaagaaggccaaccattcgtcggtgctgcttacggtcaaggcccagccttttctgaagcaacggctgctgcaattgatagcgaagttcgtcgcttaatcgacgaagcacatcaacaagcaactgaaattattcaagcacatcgtgaacaacacaagttgattgctgaaatgttattgaagtacgaaacattaaacgaaaaagaaatcttaagcttattcaatgatggtaagatgcctgaaaagaatgctgaagaattcccaagtgaaaaagcggctacttttgaagaagctaaaaaagcacttgaagctaaagaagctgaaaaaactgactcagaattagaggctgaacaagctgattcagaaacaacagaagttgcggatgatactgctgattcaaaaccaactaatgatgactcaaacgataatgcataatcggttataacgaaaaggtcgacacgattagtggtcgacctttttgtatcaataaataaaagaggtagcataatgaaggattatttagtcaaacaagtatcagaagatggtcaattacgggcctatgccgtaaacgccacacaagttatcacagaagcacaagaaaaacacgatacatggcccacatcatcagccgcttttggccggacaattgttgggacattactattaagtgccgctggtttaaaaggcgatactaagatgactgttaaagtcgaaggtgatggtcctgtcggaaaaatcgtagtagacggtaacgcacaagggactgttaagggctacgttacgaatccacacgttaacttaccctcaaatgagaaaaataagattgatgttaaagccggtgtcggcacaactgggacgttaagtgtcactaaggatcttggccttaaggaaccctttactgggcaagtaccattggtttctggtgaattaggtgaagactttacgtactacttagcaaaatcagaacaaacaccatcagcggttggcgtgtcagtatttgtgaacgaagatagcacaatcggcgttgccggtggttttatgattcaaatcttacccggagcagatgatcgcttgattgatattctagaagcgcgtcttcaagaaatgccacttgtgtcagaactattgcaacaggggatgacaccagaagaaatcatcactgaaattgttggcgaattaccaatgaagactttggaagaattacctgttaaatacgaatgtgattgttctaaggaacggtttgctaaagcgctcagctcaattgcacctcaagatttaaaacaattaattgaagaagatcacggtgccgaagcaacatgtcggttctgtggcaaacaatatcaatttagtgaagcagatttgaaagccatcttagcagaacaataggacggaatttttgcctgaaagataattttttgctatgatagcttggatattgtcgaaagacacgaagggaatgggttggcattatgacatggcaaataggagacgtgacgattccaaatcaagtagtcgtcgcaccaatggctggtattacaaacgcagcatttcgagtgactgcaaaggaatttggcgcaggcttagtcgtctgtgaaatgattagtgaccgcgggattatgcacaataatcaaaagacaatgggcatgatgtttgttgatccaaacgaacatccagtgagcatccaaatttttggtggctcaaaagatacattagtggaagctgctaaatttgtggatcaacacacacaagctgatattatcgacatcaacatgggctgtcctgtgaataaagtcgtgaagacagacgctggtgcgcgttggttattagatccaaataaggtttacgaaatggtttcatatgtgacggacgctgttaaaaaaccggtcacggttaaaatgcggactggttgggatgaagaccacatctttgctgttcaaaacgcccttgctgcagaacgcgctggtgcatcagcacttgccatgcacggtcggactcgtaaacaaatgtataccggtaaagcagactgggatatcttaaagcaggtcaaagctgaattgaagattccatttatgggtaacggggatgtccgcacaccacaagatgccaaacgcatgttggatgaagttggtgctgacgctgtcatgattggccgcgctgctttagggaacccttggattttacgtcaagttgaaacctatttgcgcagcggtgaattgattgcagaaccaacaccaagagaaaaaatcgcaacagctaagctccagttgcatcgtttagtagaactaaagggcgaaaacgttgcttgtcgtgaattcagacaacaagctgcttactatctcaaggggatccctcgcgctgctaagacgaaggctgcagttaatgaagttgaaacagaacaagcggttggcgacattttagaccgttttgttgaagaaactgaagcaagaatggcataaggggatacttaattgcctagtttcatgttaaaatcaacaagagtagataattgaaagtaatggaggaattgtcagttggcacaaaaagataatcaaaaagaaatgaatgaccaacttaaggtccgtcgcgaaaaaatgcaatttttaaaggatgaaggcattgatccttttgggagccgttttgaacggacgcatttagcagcagcgttacacgaagaatttgaagcaattgaaaaagacgacttggatgttaaaaaccaagaagtgacaattgcaggacgaatgatgtctaaacggggtaaaggtaaagttggttttgccgatatccgcgatcgttcaggtaagattcaaatttatgttcgtaaagacgaagtcggtgaagataactacaaaattttcaagaaagccgatttaggggatcatttaggtattacaggtcaaatcatgaaaactgatatgggtgagttaacggttaaagcaactcatctaacattcttgtcaaaggcattacgcccattacctgataagtatcacggtttaacgaatgtcgaacaaatttatcgtcaacgttatttagatttgattgctaatcctgaaagtatggatcgtttcacaaaacggagcaagattatttctgccgttcgtgaatatttagatacacatgactttactgaagttgaaacacctgtcttgcatggtcaagctggtggggcctcagcacggccatttattacacatcacaatgcattagacattaacctctacttacggattgcgcttgaattgcatttgaagcgactaatcgttggtgggatggaacgtgtctatgaaattggccgtgtattccggaatgaagggattgataccaaacataaccctgaattcacgatgttagaaacatacgctgcatactttgattacaaagatgtcatggatgaaacagaaggtatcatccgttttgcagctcacaaagtcttgggaactggtcaaatttcatatcaaggtcaagcaattgatttagatggtgattttgcccgtgttcacatggtagatgctattaaggctgaaacgggtgtcgatttctggcaaccaatgacagttgaagctgctcgtgaattagcagaccaacaccacgttaagtatgaagaatactggcaagtgggtcacatcattaacgccttctttgaagaattcgttgaagagacgttagtacaaccaacattcatttacggccatccagtggaaatttcaccattggctaagaagaatgccgaagacgatcgttttacagaccgttgggaactcttcatgcatggtaacgaatatgcaaatgcctttactgaattgaatgatccaatcgatcaacgtgaacgttttgaagcacaagctaaggaacgtgaaaatggtaatgatgaagctgaaggtatcgacgaagattatgtcgaagcattagaatacggaatgccgcctacaggtggacttggtatcgggattgatcgtcttgttatgttgttaactgacgctgcttctatccgtgatgtcctcttattcccaacaatgcgtccagataagcaagaaaatgaagaaatttaaaactttttaaacgcctgaaaaggcgtttttttgtgcaattttcgggataaccgccatataaagactacttttggataattgttcatgttttgcataaaataccggataaattggattatttaggtgttgaaagttctgaaataaagatgaataaataaagttgacgaatgattagatagctgatatagtagtctatgttgtcagcgagataaaagccacaacgattacgagaaacgttaaagattgcttttgaatatttattcaaaaaatattaataaagttcttgacaatcagttgttataattttggaggagtagcgaagtggctaaacgcggcggactgtaaatccgctccttcgggttcggtggttcgaatccactctcctccatatttatagggatatagtttaaaggtagaactacggtctccaaaaccgtcagtgtgggttcaattcctactatccctgtttatattatatgttgcataaacattgcgactatggtataattattcatgttaataatggcggtattggtgaagtggttaacacatcggtttgtggatccgacacacgtgggttcgattcccacataccgccttttattattgggctatggccaagcggtaaggcaacaggttttgatcctgtcatgcgttggttcgaatccagctagcccaatttcaaggacaggatttgttcttttatggcggtatagccaagtggtaaggcagaggtctgcaaaacctttatcaccggttcaaatccggttaccgcctttgcgtttaggcgctaaccttaaacgttctgtaagatgccggtgtggcggaattggcagacgcgcgggattcaaaatcccgtttcctcacggaagtatcggttcgaccccgatcaccggtataatggattattatacaagttttaaaagccctaaagatagggcttttttgttgtctaaaaataagttattgtctggcatgaaagcggtatgatacgacagggatatactaagtacatcaaaagggtgattgtgatgaagaagtggggctttttacttagcggtggttttctagtagcaattattgtaggaatattactgataaatcagcgtccaaaccaagcaagacaacaagcaaatcgtgtccatgacagtgcaccaactttttatttacatgggtatggtggctttggtcgttcgagcgatagtatgattgcggcggcagaagagcgaggtagggctactaaggtattaaccgcaattgtcagtcggacgggacaagttgaattagaggggcattggacaggcaatacaacacgaccgattatccaggtgatttataagaataatcgcaatgccaattaccggcaaaatggtgaatggttcaaacgggtattgattgcggttaaccggcagcatcattttaaacaatttaatgtagtcgctcattcgatgggtaatttaacattagctttctatctggcaaataatgctcagaataaaaaaatgccacaattaactaagttcgtttcgattgcggggcactatgctggtattatcgggatggatgatcgtgcaaatcaaaatcatctggctaaaaatggccgcccacagcagatcaacgccacttaccggcaactaatgggattgagacacagattacccaaaaatcaaattcaatacttaaatatttatggggacttatcagatggtagtgattctgatgggcgtgttagcaatgtctcttcacaatcgttgcgatatttagtggcaccaagagcaaaatcatatcaagaagttcaatttaagggctcgaatgcccaacatagcaaactacatgaaaacgaagctgttaataaagcggtaatcgatttcctatggtaattaaaaaaacagcaacatcgacggtttatgagtcggtgttgctgtttttttgttctaagcggtattctttagcggcggttattaaagtccctaataaggcttgttgagttgctgagaagagttgtgtcttacgagaggctaatgaaatgtagaaggtgggttgcggttggtcaagtaagtctaaagtaattaagtcatcagctggtgtgatggctgtttcagttagaaagccaattccgacgttttcatggaccatacttttaagaatactaacatcgttggttcggtaaataatatcagggttcatttgattcatcgtcgaaagcgtatcaaaaacgacaggatgaacgaatccctccgctaacatgataaaattttcattggctaaatcacgaaaagcaacttgtttcgcgtttgcgagcgatgattttggactgacaacgattttaaagtgatgttgttcgataatttcagccgttaaggcatcattttctagtggcgttgccgagcccagtaaagcagcatctaaacgcccggcttctaaacttgccagtaattcggtagaaccaccgtcaaccgttgcaaaatgttgaatactcccagccttgactaatttctgcgctaatttagagaaataataggtgccaatgataggtggcaatccaaaacgaagttcagtggcagacaaattttgcatatcggtagttgtcaattgaatttcatttagaatttttaccgcatgtcgattgagttgttcaccgctatccgtaataataatcgattgatgcgactggtcccgacggattaatttagtctcaaattctgtttctaagcgcttaactgcataagtgatggtcggctggctaacgccaaattggtcagcaactgccgtaaaattttttaatttaattaaagccacaaaatattctaaatctttaatcttcatagaaactcctatttaatgcgatttgaaaaactcatataaatctattttatcacagttgtaagttttgactatcaaatgttgaagcgtgtatagtgaccaacatgatataaaaagaaaaggagattattaatatgaaagcacaacaaattttaaatgatccatttttaaataaaggcacagcattcactgctgaagaacgtgcacaatttggtttaacggggatgttaccacctcacgttcaaacaattgatgatcaagttaaacaagcatatgcacaatatcaatcaaaagctaatatgttagaacaacgtattttcttaatgtcaatttttaacgaaaaccgcgttttattctacaagttattcagccaacacgttgctgaattcatgccagttgtttacgatccaacgatcgctgatacaatcgaaaactacagtgctttatatgttaacccacaacacgcagcattcttatcaatcgacgatcctgattcaatgaagacaacattggcaaatgctgctgatggtcgcgaaattaaattaatcgttgtgactgatggcgaaggtattttagggattggtgactggggtacacaaggtgtcgatatctcagttggtaaattaatggtttatacagctgctgcagggattgatcctagccaagtattgccagttgttttagatgctggtacaaaccgtgaaagcttattaaatgatgaattatacttagggaaccgtcatgaacgtgttcgcggcgatcgttactacgatttcgttgatcaattcgttcaaacagctgaagaattattccctaacatgtaccttcactttgaagattttggccgtagcaatgctgctaacatcttgaacaagtacaaagatcaaatcgttactttcaatgatgatatccaaggtacagggattatcacattagctggtatcatgggtgctttaaatatttctggtggcaagatgacagaccaagtttacatgagctttggtgctggtactgccggtgctggtattacacaccgtatcttcgaagaaatgttacaagaaggtttaactgaagagcaagcacgtagccgtttctacatggttgacaagcaaggtctattgttcgatgatgatccagagttaacaccagaacaaaaaccatttgctcgcaaacgtagtgaattcgctaatgctgatgaattaacaacattagaagctgctatgaaagcaatccacccaacaatcttggttggtacttcaacacaacctggtacatttacagaatcaatcgtgaaggaaatggccgctcacacagaacgtccaattatcttcccattatcaaacccaactaaattagctgaagcaactgctgaagacttaattaaatggactgatggtaaagccttagttgctactggtattcctgccgcacctgttgaatacaacggtgtcacatacgaaattggtcaagcaaacaatgctttagtatacccaggtcttggtttagggacaatcgcttcaactgcaaaagtcttaaatgacgaaatgatcagtaaggcagctcactcattgggtggtatcgttgacccaacagaagccggcgcagccgtattgcctcctgttacaaaattagatatcttctcacaaactgttgcgacagctgttgcacaaagcgctgttgaccaaggtttgaataaagaagaaattactgacgtgcaaaaagccgttgcagacatgaaatgggaaccagaatacaaagcactataatttaaatattaatttggtaggagagtgaaagagttggcagcatttctaacatcattatcaagtgtcgtcgaaatcgtcttagtcattgctttggggttttggctacggagttctaaaaagttcgatgataactttaagggtacaatttcatttttaatcatgaacgttgctttaccattatcaattttcgtttcagttctagataacttaacacgtgaaaagttggtcggtttatctggcggcttaatctacgttttaattagtttcgccctaggttacttagttgcttggttattaacaaaggctttccggattcgtccaggtcgtcgtgggacatttatcaatatgttcgttaatgccaatacaatcttcattggtttaccattgaacttggcactattcggtgacaagagtttaccttacttcttgatctactatgttgctaacactgtttcaacatgggcaatcggtgtcttcttcatctcaaatgatgatcctacaaaagaaaaaggcgctgctaaaggcaaatttaactggcgtaaattattaccttctccattaatcggtttcttagccgcattaatttatcttttaactggtttaccattaccagaacttgttgataagacattctcaatggttggtgggatcgttacaccaatgtcattgatctacattgggattatcttagctgatgctggtttgaaatcaatccatttcgaccgcgatacaatcttagccctattaggtcgcttcgttgttgcaccagcaatcatgattgcgattatgatgttcttcaagaatacaacttcaattccaacaattgaacaaagcacattaattattcaagccgcaacaccaggtttggctgtcttaccaatcttagtcggtcaatcacacggggacgttgaatatgcaacaaacgtcgttacaacaagtactgtcttgttcgtcgtcgttgtgcctatcttaatgcaaatcgttcaattcatctagtttcataataagagcgttagatattccgagtatctaacgttctttttttgtgtataaatgtgtaataatacacaatctcggttgataaacgaggctatctggactacaatgaaagcgtagtcaataaacaagagaggttgattaatatgtcagaaaagatttatacgaaacaagcgccagaaccattaggaccatacagccaagcaattgcaacggataagattgtctttatgtcaggtcaactaggcttaaaagacggcaaacttgcacctgatttagcaggacaaacgaaacaagcgattatgaacttacaaagtgttctaaaagaagcagggctaaccttagaaaatatcgttaaaaccaactgtttcttaaccaacttagatgattttaatgaatttaatcaagtttatgcagaatacttcggtgacattgcacctgctagaagtgccgttcaagttggcaaactaccagctggtgggattgttgaaattgaagccatcgctgttcgataatatttgattgggagttggatcaatgaataaagtagccattatcggtattggtcacgttgggagtacggtggcctataagctcgtttcccggcgcatttgtagtgagttagttttatttgatcaaaagccaaaattagcagaagcagaacgaaatgatttagaagccgggcaagttgatcacacaggttttgttaagattacagctaatgatgaaagtcaattagcaacttgcgacctagtgattttctcggcaggagacattagtatcctcgaacatagtgatgatcggtttgatgaattaacctatacgaaaacagcagtcgcagagtgggcccctaaattaaaggcggctaattttaaaggaatcttattgaacattactaatccatgcgatgtgattacccaatatttacaagctttaactggctttcctaaggaacgcgttttagggacggggacaactttggatacggcgcgcatgcaagttgcagtcggccattatttgaacgttgcgcctaatagtgtccaagggtatgtattaggtgaacatggtaattcacaatttgtcgcttggtctggggtgcatgttggtgggcaaccactagcagcacaattatcgccagaacaattggcacaatttgaagtcgatgctcgccaaggtgcttgggaaattctcagtggcaagggttatacgtcttatgggattgctaatcaagcagcgcactgtgccgcagctattttacaaaatacacggcaagtcttacccgtttctaactttgatgacactgtccaatgctatgttggccatccagcaatggttggtgctgcgggtgtcttacaggattatccaagtcagttaacgacagaagaacaacaaaaatggcaaacatcgattgatacgatcaaacacatgtatgccgctatctaaatgaaaagacgtcatccaaattaatggatggcgtcttttttatggttaaaatagttgtcccaagaggaacatcatgagcggtaccatcaacaaagccccgagtgttgtctcggtcaccaggacagcggcaaaatcagcgtctgtgttataaagccgtgcgacaacgggggcatttgtcatgacgggcatacaagattgcagaatgaagacttgtttcatgagggttggcatgtgacttggatagactaacgcagtcattaataaaggcgcaaagatgaaccggccggccaagacacctagttgatctttgccaaagcgaatatttttgagtccggcgttataaattgaaatcccaatgaagagcatggatagtgggatggtcaggttgccgagataagtgaaggactgtgttaagaaactgggtaagtgccaatccaataagaccaggataacgccgataataaagccaattagtggcgccgagaaaaccttctgtaaaatagttttaagagataggccgttctgaacggtaccatctcgttgaattaagtaaacaccaagggtccaaaaaatagtggtattagccatataatagactaagacaaaggggagactgcgctgaccaaagagggctaggttaatcggtaagcctacaaaaaccgtattggaattgaaaaacatggattcgaataagccacgtcgactggcatcgactttaataagtcgtgcgacgataattgaaatcccaaataaaagtaacattgagataactggaaaacggagattaggaagtaaagtgactaattgattatgtgaaaagtccttagtgattgaaataatcatgtacggtggtagagcaacttgtgtcacaagtttagcgatgagcgcggtactttcttcattaaaccaatgccgtgcagccaaggcataaccgaccacaatcatgataatgataataaaaacaccggcactactattaactaaggtttgcataataagcttctttctatttgaaaatcgttctgctattagtataaaacgattagggatgacttaaaagcaactctattaaggagatatttaagtaatgggctaaatagttcgtgttttgatattgatatcgaataaagggtggtatttattggttaaatcacgtataataaatagaaataaatcggaataggggcgaaaatattgatttcaactgaaacaacattagcaggcattcattttgacaattgtttaatgaatgcagcaggcgtttattgttatgatgcagatgaactaaatcagattcaaaaatctgcagcaggcacttttgtaaccaagagtgccaccgtggtcccaagggcgggtaatccggaaccacgctatttatcaacaccgtggggtagcattaactcgatgggtctccctaataagggcttaccttattatctcgattacatttctcaacaacaagccctttttcctgagaaacgatattttcaatcaattactggtttcaatatctctgaggacgaaacgctattgaagcaaatcacagattctgattttaatggtttagtggaattgaatctttcttgccctaatgtgccaggaaaaccacaaacgggttatgattttgaaacggttgaacaaattttaacgcgggtctttgaagtgtatgacggaccgttaggcgtcaaattacccccttattttgatattgttcattttgatcagatggcggctattttaaaccaatttcccttggcattcattaattctgtcaatagtatcggtaatgggctcacgattgatgctaccaccgaacgggttagcattaaacccaagcatggttttggtgggattggtggcgactatattaaaccgacagcgctcgcgaatgtccatgccttttatcaacgattgaaacctgagattcaaattatcgggacgggcggcgtcaagtctggacaagatgtttttgaacatctattatgtggtgctagtatggttcaagtcggaactgcactttataaagaaggcccacagatttttgcccgcttaacagcagaattacaaacaatcatgcaacaaaaagggtataataaaatagccgattttaagggcaagttaaaatatttagattaaagagagtgattaacaaaatgcaatataaatatttatttttcgacatggataataccttatttgacttcgatgcggatgaagatcaagcattagaacggctatttaacgcccaagacattgacttaacgagtgatattaaagcaacttatcaaactttcaatcaagggttatggcgccaatatgaacaaggagaattaacccgggaaatattattgaacacccgctttgcgactttttttaaaaagcagtttaataaagtggtcgacggtcaacagttatcaagtcaatacttagataatttggctttaggccacgatttaatgccacaatccgaagaattattgcttggtttgcaagcgcaacacgcgaagttatatatcacaacgaacggtgtggcgcgcacacagtaccaacgcctgcaagattcggggttagcgcattatttcgatgccatttttgtatcggaagaattaggttatcaaaaaccggacccagcttattttcaaactgttttccagaaattagaaactgttacaatgactcagtcattaattgtaggtgattcactgacttctgacgttcagggagggcaaaatgtgggggtggcaacagcttggtacaatccaacaggtcaaattaatcatgatcaggccttacagccaacacatgaaattaaacaattagcagaattattgacgctttaagcgtgacaatcaaagcgccaaccgttagagtgcgtaaaaagatggagtgacaagagatgaaaaaacaacgttattttaggattagtttaggctggcggattttaattggcatcgcacttggcttagttgccggtgggattttctaccaaaacaaagctgcaattgcggtgatgcaagcgataggaacgttgtttattaatttaattaagatgattgtattgccaatcgttgtttcttgtttggtagtaggcatcgccaaaatgggcgatatcaaaaagttgggtcgaattggcggcaagacacttttatattttgaaatgatgaccaccattgccattgcattggggttgaccgtcggtaatttgacaaagccaggggccttaatcgatattcatagtttgagtcaaggttcaattggccaatatacagcggcggctgagtcagctagcaatcatggcttgggcgatattattatgaatattgtgcccacgaatattttcaaagcccttagtgaaggggaaatgattccaatcatcttctttacggtcttgtttggcctagggcttgcaacatttggcaaacgtagtgaatcgctgattaacgcttttgaaatgatttcagaagtgatgtttaaattgactaactggattatgcaattagcgccaatcggggtttttgccctaatcggtgtgacgattgcccaatttgggtttgatgcattgaagccattggtttatttcctagtgatttgttacttaacgatgattttcttcgttgtggttgtggcggggctagtggcgcgaatttggcacattaatatcttagaactgttgaaagtctttaaagaagaattagtgctatcattttcaactgccagttcggaagctgcgttacctaaagtaatggaaaaaattcaagattacggggttagtcagggaattgcttcttttgtcattcctacaggatatacgtttaatcttgatggatccgcaatctatcaatcattagcggcgctctttttagcgcaagcttaccatgtccaccttagtttaatgcaacaattaacgctcttagtggtcttgatgattacctctaaagggatggccggggtgccgggggcttcatttgtggtattactcgcaacgattacgaccattggggtgccagctgctggtgtggcattcattgctgggattgatcgcttagtcgacatggggcgaacagcagttaatgtcatgggtaattcattagcagccgtgattattgctaaatctgaagatgaattcgatgaagcaaaacgaacgaaatacttagcgcaattaggcgctaaaaaatagtaagactaaatagtagtcagccgataaaaaaaggactaggatgagaattgtctcctagtcctttttactgtctcagggtatagaccggtctggcaatgatttaaattaatgcgacatcttcaaatcagctaccttgaaatgttgtcgtcgttaaatactagagagcaatgtatacttatgaaaacggataacgacggcattatctagaccaatttcatagataacgtaaaaatgattagacagattagagatttgtggtaaaataaacgagtaaagcgttttaaaaagaaaaacgttttggtgtgataatagattgatagggattaatgccataatatttcattataattgttagcgtttttatcagtgtgttattacaactattttataaggaggtttttgtgaatggttggaatcgttattgcaagtcacggggagtttgctaaaggtatcatgcaatctggttcaatgattttcggcgaacaagaaaaagtacaagctgttacttttatgcctaatgaagggccagatgatttgaaagcgcatttagaagctgccgttgcaacgtttgacgcagatgatgacgtcttgttcttagtcgatctttggggaggttcaccatttaatcaagcaaatggcttgttcgaagctcacaaagataaatgggcaatcgttactggtttgaacttaccaatgttgattgaggcatacgcatcacgtttatctatgacatctgctcatgaaatcgcagcacatattattgatgaggctaaggcgggtgttcgggttaaacctgaagacttagaaccaaaagaagcgccaaaggcagaagcaaaacaagctgctaatacagggactcctggtaagttcaaatatgtcttggcacgtattgattcacgtctattacatggtcaagtggcaaccacttggtctaagacaactaacccaacacggattattgttgtttcagacaacgttgctaaagatgaattacggacaaacttaattaaacaagcggctcctgggggcattaaagcgcatgtggtgccaatcgatcaaatgatcaagttagcaaaagatgatcaacacttcggtaaggaacgtgctttattattattcgaatcaccacaagatgcacttagagccgttgaaggtggcgtaccattagaaacaattaatgttggttcaatggcgcactcaactggtaaagttcaacctaatactgttttggcctttgaccaagatgatatcgatacatttgaaaaactaaaggcaaaaggcatcaagtttgatgttcgtaaagtgccaagtgattcaaacggtaatatggatagcatccttaaaaaagcacaatcagaattagacaaacaaaacaataaataattaactatcagaagaaaacggaggattaataatcatggatttgaatttcattcaagtgattttggtcatttttatcgcatttctagctggtgtggaaggtatcttagatcaattccatttccatcagccagtcattgcttgtacattaatcggcctagtaaccggtaacttattaccatgtcttatcttaggcgggacattacaaatgatcgccttaggttgggctaacgttggggccgctgttgcacccgatgctgctttagcatcaatcgcatctgcaattattttagtacttggtggtcaaggcaaagccggcgttacatcagctatcgctatcgctgtgccgcttgccgtagctggtttattattaacaatcatcgtacggacattagcaacaggtatcgtgcacatcatggatgctgctgctaaagaaggtaacttccgtaagatcgaaatgtggcaatacatcgcgattatcatgcaaggtttacggatcgctatccctgcaggcttaatcttagcaatcggtgctggccctgttaaagaaatgttgacagcaatgccagtatggttaacagacggtttagcaatcggtggtgggatggttgttgctgttggttacgcaatggttatcaacatgatggcaactaaagaagtatggccattcttcgcaattggtttcgtacttgcaactatctctcaattgacacttatcggacttggcgcaatcggtatttcacttgctcttatctacttagccctttcaaaacaaggctcaggtaataacggcggtggctcaaatactggtgatccgctaggcgatatcattgacaactactaagaaggaggctgacaaaaaatggcagaacaactaaaattaacaaaaaaagaccgtatctctgtttggttacgttcaactttccttcaaggttcttggaattatgaacgtatgcaaaatggtggttgggcttactcattaatcccagcgcttaagaaattatataaaactaaagaagaacgttcagctgcgttagtacgtcacatggaattctttaatacgcatccatacgttgcttcaccaatcatcggtgttactttagcccttgaagaagaacgtgctaatggggccccaattgacgatgttacaatccaaggggttaaagttggtatgatgggacctttagctggtatcggcgatcccgttttctggtttactgttaaaccaattatcggtgctttagctgcttcacttgctatgagtggtaacattcttggcccaatcatttactttatcgcatggaatgctatccgtatgtcattcatgtggtacacacaagaattcggctatcgtgctggttctaagattactgaagatttatctggtggtattttacaagatattactaagggtgcttcaatccttgggatgttcatcttgggatcactggttaacagatgggtatcagtcaagttcacaccgactgtttcatctgttaaattagataaaggtgctttcatcgactgggataaattaccaagtggtgctaaaggcattcaatcggctttacaacaacaagcacaaggtttgtcattaacagaccataaagtaacaactttacaagataacttagatagcttgattcctggtttagctgcattaggtttaacattattctgtatgtggttacttaagaaaaaggtatcaccaatcgttattattcttggcttattcgtagtcggaattgtctttcatctattacacttaatgtaaaagagtgtgtaagtaggcgtttacgttttgaggattaactggatttgacgaattggggctgaaagcacgtttcaaaaacaaaggaagggctagggcaaatttactttgtcctagcccttcctttttataaaagcgtataatgaaagtaagttcttgggaaatggagtcgatacaatggttcaatcaatcaatacaaaagtcgaattagtcatcaatgcgacctcttttacggccttatcagattacggcaaaattatgattggcgataagggttttgaattctttaatgatagcgatgcccgccagtttattcaaattccgtgggaagaagtcgattatgtgattgcgtcggtcatgttcaaaggtaaatggattccgcggtatgcaattcaaactaagaaaaatggaacttatacttttgcttcaaaggagcctaagaaagtgttacgggctattagagaacacgtaccggctgaaagattagtacaatcgctcagcgtgtgggatgtgattaagcgcgtttttaaacgtcaatcaaaataaagcattattaaaaatagaccttggttgaatgatgattcagctagggtctatttgtttgtcaacgattgtaaaattgcgactccttctagggcgtgctaaaataccatataagattaatttaatgaacatacaagcaaaatagaagaggggattcaaatgggatttgacaaagcgattatcgcgttaaaagcaggcaaaaaagtagtacgaacaggttggggtggcccagaattatttattgttcaagttagtggtgatacgtaccaaggagcagcaatcagtccatatttactgattaaaacaacggaagaaccagcttattcaatgttccaaccaacttcttgtgacgtattagccgaagattggcagttagttgactaatggggcattttacagatttaaaacaaaagacggttttagtcaccggggcggcttccgggattggccaagcacagatgctggcctttttagcggagggggcaaccgtcattgctttagataaagcgccgattacaaaggtggcagacggtttaaaaacggttcaagtcgatgttcgagacgctacccaattaacggagacgttacaaaacttgttagcgacagggcactcatttgatattgtttgcaatacagccggcatattggaccaatacgcgccaacgcttgaaacgagtgcagctgattgggataatctgatggcagttaatttaaaaagccaatttttagtgactaatgcaattttaccaaggatgctggcccatcataagggtgtttttgtgaacatggcttcaattgctggattagtggctggtggtggcggggcggcctatacggcttccaagcacgcgattatcggttacaccaagcaattggactacgattacgctagtcaaggcatccgggcgaattgcatcgcaccaggggcgattgaaaccccgatgaatgctgctgattttacgggcgcaggtgaaatggccaaggaagtggcgcgtcaaacgccagctggtcgttgggcacaaccatcagaggttgcccagttaagtttgtatttagcaagtcaagcatctgattacatccacgggacggtggtgccaatcgacggtggctggcttgaaaaatagtaacattcagatcttaacaggtgaaaaacgcttgtaggacatgctttaatggcatagaggagagaaaaaagttatgcaacagattatattattattggcagtggggattttagccggtattttaggtgcgattctcggcattggtggcggcattatcctgacccccgtgttaacacttgcaattggcctagatatcaagtatgcaatcggggctagcatagtcgccgtgattgccactagttcaggcgccacaattgcttatttaaaagatgatatgttgaatttgcgagtggcgatgtttcttgaaattgcgacaaccgtcggagcaattatcggggccttattaaccggtgttgtcccgaccggctttttattcgttttatttgggagttttttattgttctcgacttacaatatgattcaaaaactgcgtggtaaaaaggccgaagaacatgttggcgcagcaaatgatcagtgggctgagaaattaaatttaaatggtacttattacgatatgcccaaccaaaagcaagttgattatcaagttgaaaaagtacctggtggctttgcgatgatgtttggtgcggggattgcttctggcctattagggattggtagtggggtgtttaaagtaaccgcgatggatacgattatgaagatgccgctaaaaccttccagtgctacaagtaatttaatgatgggtgtgacggcagcagcttcagcaacggtttatttctttagtggcgcgattctaccagaaattgctgccccgttagccctaggaattttagcgggcgcaacagttggttcaagagtgatgcaacatttgcaaccaaagtttattcggatgatttttatcccaattttgctttatatgggactgcaaatggtgcttaaaggattcggggtgcacatctaatgacagatcgtaaaaaagaaatggcgcaaattgaattagtaattggtaaaatcttacgagtgggtgttttagtctcagcgactgtcctcattatcgggatgcttctatttttaatgcatggtggaaccggctatggtgaacaccaatttcctacaacttttacaatgattttccaagggatggctgaattaaaagctggggcggttatcatgtttggcttattctgtttgattttaacccctgttttacgagtggtggtttcaatctatgcttttgctaaagaaggggactatctgtatgtttggatcacggtcattgttttagtgattttaattattgggatgacgattggctttatcaaataaagagtgtgtttcaggcgcttatcttccgaggcttaacaaagagtgacgaatgattgcaacaagcaagcaggcggcattcaaagttaaccggaggaagatgcctgaaaaaacacgtttacactataaaaagcccaggacaagaattacttttgtcctgggctttacttggttattgatcttctaatcctaagatccgttttttcttttcttcgaattcatcatcggtcattaagccgtcttctttcatcttgagataagccataattagttcgccttttttgacgaaacttaagtcttcttcggccggtttctcgatgtaatcgttcattagttgatagagcttttgcaactcatcgttatcagtagcttcaaagctgataatgattttttcaagggcgtggttcggcttttgatagagaatttggagatggccttggcgataagtggcttcaaaaaaacgaacggattttaattttttaaaggcaatctcacgatcgtctttgtcatttttctttaagagtcctgggtagtgaagtgtgagaatttgatcatcataagtgatttcaagtttgcgtggcttcttaatgcgataagtctgcatatgactgctccttttaataaaacttaagtaaaagcaaggacgttcttaagatacaacgtctaaacttacccctatcatagtagataatgggcgtaaatagcaagtgttgccttttgttaaaaaaatgaggtggttaggatgcaatttttcactggtgtgcacaatggcttattactcgcattacccatctggggcgtgttaatcttaatggtaagctactggttatactaaaagacaccgagatgaccgggcggttgtttaggatgtcttttttagataattcagtcttttttaggtcttaagtcggtttttatgctagtatgaatagattacaattaagaacattgattgcatatgatttaattaattactataatagtatcaaatgtccaaagataaggaggaggaaaccaattgaatattgggatatttacggacacctactttccacaagttagcggtgtggcaacctccattaaaactttaaaagaggggctcgagaaaaaggggcactctgtttacatatttacaacaactgatccccatgttgataaagaaacgattgaaccgaatattttccgctttgccagtgtaccgtttgtgtcatttacggatcgccggattgctgttcggggcctttttcatgcctatcaggttgctaaagaattagatttagacatcgtgcatacccaaactgaattttcgatggggtatatcggcaagtttgtcgctaagaatttgaaaattccttgtctgcacacgtatcacacgatgtacgaagattatttacattacgtcttaaacgggaagcttttgcgtccttatcatgttaaacagatgagtaaggcctttttataccacatgtcggggattgtcgcaccgtctgaacgggtttctcaaacgttgaatcggtaccaagtcaaagcgccgattcggattattccaaccggggttgacattagtcggtacgaaaaacaagtaacgttagatgtgcggaagtccttaggcttaacaaaggaacaacccgtcttactatcgttaagtcgagtggcttacgaaaaacggatcgatattattatcgatgcactgccacgtttggtcgcacaaaagccagatttaatgttggtgattgtgggcgaagggccagcgcgtgaggatttggaagcgcaagtggctaaattagggatgagcgaacacgttatttttaccggcatgattgataacgatgaggtttctaattattatcacatggcggatttattcgtttcagcgagtgattctgagtcacaagggctgacgtatattgaagccatggcggctgaagtcaaaattgtcgtgatggctagcccttacgccagtgaattattgacggatccgtcgattggcacgacttttacaactgaagatgaaatgctgcaccaaatcttgaattacttgaatcatccgggggcctttgatgatccggcaccccggcaaaataagttgcatgcaatatcggcagactactttgctgaacagatgatccaattttacaagcaatcacaagtgctatacgatgaactgaaactagatcaagatgatttattagaattagaagatatggatactaaaaaataaatggcataattgaaggaactgttgattgtaatcagcagttttttattggtcaattatcattagaaaaagggtcggttatgagtcgaacaaataaaattgtgtttgcagtcatgttagcgattggctgtggcatatttgcttacgagagtcacacattacaattaaatcaattggtggcagatattaggcggttaaaagtcggctggttacttgtcgcactttcatgtatgttaatttcttggttctttgaagcattagtattgcgggtctttttaaagggccggacgacggatttttcactatttaatgccttgcggattccattgattgcgcagctttttaatgcgattacgccattttcttcgggagggcaacctgctcagttggtcgcgttaatgcaatcacgagtagaagctggtcaggcgagttctgtcttattaatgaaatttatcgtttatcagtttatggttttggtcaactttttactgagtatgattattggcttttcacaggtttctaagcattttgggacgctggcgattttaattaatttcggtttaatcgttcacgtcgtggttttagtcgtcttgttgttggtgatgtattacaataaatttactaagcaattggtgcattggttgttaattccggtcagctggtttatttccaaaaaacggatgattgaatggcgtagcgtactattaaccaaaattgatacgttttatgccgagagtctgcaccttaaaaaagaaaagaagaaacttgtcaaaggctgtttactaactttatgccaactctttttctactatagtgtgccgtatttcgtgttattagcgttgggcagtccgaacgtaaactacttagaagtgatggtcttacacgtgatgattgtcatgattgtatcgctgttccctgtaccaggtggttctgggggtgcagaatatagtttcaagactttatttgccacctttacgctcagttcgagtaaactagtgttagccatgttgttatggcgactttttacttattatctaggaatgtttatggggattggcgctttggcggtcaaacctaagttaagtgctaaaaaataggaggttattaacatgcaaccaacaatcggctttatcggtatcggtgtaatggggagcagtatggttaaaaatctattgaaagcaaattactcagtcgtcgtttacaatcgaacgaaacaaaaggcggatgaagtggtcagcttaggtgcaaaatgggcggacacaccagcagctgttacgacccaaagtgatgttgtcttatcaatggttggttatccacaagatgtggaagccatttattacggggatgacggtatttttagcgcggttacaccggataaaattgtcgtcgatatgacaaccagtaccccaactctggcccaaaaaattgcggccacggccagtgaattaggcttgcaagcattagatgctcccgtttcaggtggggatatcggtgctcaaaacggtactttaacggtgatggtcggtggtgatcaagccgcttatgaacaagttaagcccgtttttgaagcggttggacaaactgtgcaacggtttggcgaagccggtaagggccaacataccaagatggccaatcaaattatgattgctggtacaatgactgggatgacagaaatgttggtttatgctcaagcagccggcttagatttaccagccgtcttaaaaacggtcaacggtgggagcgctcaaaattggagcctcgcaaattatggtcctcggattctagcgggcgattatacacctggcttttttgcaaaacatttcttgaaggatttgaagattgccttagaggaatctgagaaaatgggtctcaatttaccagccacacgtcaagctaagaaattatacgcgagattagtgaatgaagcgggccttggcaatgatgggacacaagccttgattaaattatggacagattttataaaataattgcatataaacggtgcagtcgaggcctttttctgataaactggtagatagttattaaaggaggattcgccatgcaatcatcacagttagttgcgattatcaaacgtctggtagcaatgcaagaagatcaaagcgctgaggttcaagaaagacgttttgaaaaggaaggcgatttaaaagcgactgttagctatgatccacaagcacaagcctttgaacttgaagacagtagcacacatcaacaattccaatttgacaatattgatttagtcgcaatggaactatacgatttattagcagactagttaattaaccattgagtatcaaattacttggtggtttttttgctacttggagtggttagcgctttatctaacggctcttgagattcttaaaaatgggttaatatttgaaactgcactcggtttcgtattgatttttaatactgacatgtgtaaactaactgtcagattgtcaatagcttttaacgaagctaaatgacctttaacggaggctattgtatcgatgaaacagattggtcataaaattcaggccggattaagtacgcgctggggctttttcctatttgcggtggctttattctggcttaaaacgatttatgcgtaccaaacaaaatttaacttaggcgtcaaaggcggtatgcaagccttcttgatgacaattaacccgattccaacaaccttattgttatttgggattgccctatttatgaatggccgtaagtcgtacgtgacattaatgattattgatttattaacgtctatttggttgttctcgaatattctctattaccgagaattttctgattttttaacctttaacttaatgaaaggttcaggcgcggtttctaataacctggggaagagcattgccggcattattgaatattccgatttcttagtttttgcagatgtgctgttattattaatcttattggcaactaaaataattaagattgatcggcgtgttttcatgaaacggaatgcttttgcgattactgggttatcagttgtcttattcggcgctaacctagggattgctgaagcggatcgttcagggttattaacccggacttttgataataactatattgtcaaatatctagggatgaatgcttacacggtttatgatggggttaagacgactaagaataatgccattaaggccaatgctgatagcagtagtatgagcagtgttttgaagtatatgaaggataatcgagttgcacctaatgttgaatatacaggggttgctaaaggtaaaaacgtctttgtgattcacttggaaagtttccaacagttcttgattgactacaagtgggataatcaagaagttacgccaaatatcaataagctctatcatgatcaaaatacgttaagctttgataatttctttaaccaagttggtcaagggaagaccgctgatgctgaattaatgcttgaaaactcgttattcgggttacctgaaggggccgccatggtcacacaggggacaaccaatacgttccaagcagcaccagccatcttaaaccaacaaggctacacaacagcttcattccatggggatgtcccaagtttttggaaccgggataatacctacaagtcatggggctatgattacttctttagttcacagtacttcaaagaaggtaaggactataatgttggttacggcttgaaggataagattttcatgcaagattcagcccgctacattgaacaattaccacaaccgttctatgcaaaattaatcacagttacgaaccattatccatacttattggataagaagaaccaatcgattgctaaaaccgatactggtgatgataccgttgatggttacgttcaaacggctaagtatttagaccaagcactaggcgaatttatgacttggttgcaaaagacaggtttggataagaatagtatgttggtcttatacggggatcattacggggtttctggtaatcataagaaggccgttgccaagttattgaagaaggatgaattcaatgacttcgataacgctcagttccaacgcgtaccattcatggtgcatatgcctggcttaaaaggcggcgttaaccatacgtatggtggtgaaatcgatgtcttaccaaccttattgaatctgctaggggttaagaataacgataccattcaattcgggtccgatcttctagcggctaaccgtaatcaaaccgtcgtctttagaaatggggattacgtggcaccagattacacgaaggtcggtagtacttactacgataccaagacaggtaaggaattgactaagatgaccaaagcgcaaaaactccgcgtcctagcgcttagtgaacacgtgacaaaggaactctcattgtcggataaagtcattaccggtgatttacttcgtttctatacgccaacaggctttgaagcaactgataaaacgaagttgagttacaaggttagtgatgctaaggcacaactaaaagctgataagactaaaacgagtgttatccaaaagaacaatggtaaatcgacgatgaatctctatcaaacagatgcacctgaattgaaataaaggtagtaaagccagagtggttaatcactctggcttttttgctgtcttttttcaatcattttacttgtcagcgtcgttaaaaaaaggtacgattacatcaatcaatacacatgataatgattatcaattaagaaaggagtttatctgatatgagtcaaacaattgtggaacagacgctgcgaaagttgaaagtgaacaatgtacgaattacaccgcaaagacaggccgttttggaatttatgattggtacgcatatgcacccaactgctgatgatgtttatcaagcgttagcaggccggtttccgaatatgagtgttgcaacaatttataataacttgcggttatttacagagctaggtgtcatagaagaaatgacctatggcgatgcctcgagtcattttgattttgcgcagactaaacattaccatgccatctgtgatcgttgtgggaaagtagttgacattttttacccaggactagaagatgttgaaatagttgcccagaacttaactggttttatggtgacgggccaccggatggaagttcatggtatctgcccagaatgtcagttggtcaatcgctaattaggtgaatttagtgaatatttagaaaaaagcaaaaaagttgcattttttacttgacgatggctatagatgttggtatagtagtctatgttgtcagcgagataaaagatattcatctgataacgagtgatttatgttaagaactttgaatatttattcaaaaaatatttataaaaagcgcttgacagttcactatgaaagatgatatattaattaagctgtttcaacacagtagatctttgaaaactgaacaaagttttgataaaccaaatgtgtagggtcgcccttttgttttagaatatttggtcaatataaaaacccccgatattggattttggtccaatatcgggggttcacttcatttattcaatacgtaaactccctattttttccaatcgactagcccgtcattaaaatgatttttatcggtaaacttaaatgtttcttgctgcttgtctttaccagcatttttaaccttaagtatttgttcaataatcaaactatctttcgtttcctttaaaatttgataggtcccccggttagtcataccactcgcatccgatacctgaacaattgtgccatcttcattatatgtaactttagtatcgttactataccaggtaccaagtattgaatattgaaattttccatccgtatttttcccagaagttgtcgattgagcacttgaacttgtcgccgattttttagtactgctcttttcgtttttttgtaccgttacactttttttactagaacttaccttggcctgatcagttttattcccaaaagcaaccaacagtaagctcattaaaataatagtgacccccacgcttcttttcttcaaataaatcccccccactttttcagttcctataaaaatatagcatatcttaagaaatatttaaatattttccttcacatctttaattatttaggcagttactcttcgataataaactggtttgaaaataaacaaaatactgtcaaaaaactgattaaaaaactaattttagcgaccactgtatatctataactgacatcaatttgattaaccccttttttcaaattgagacttactgtcccaaattttgttctatcaggtacggtattttgattattaattctagtaataattcctttataataaagaattggtaatttaattttactattctcagttgacttaaccgtcattttaaaatgatccttactaatgattctcattggtttaatctgaccaccattgtattcttttttaactattagatgttctgtatttaaaagagccgctttaggatagtaatctttttgtctaaagcgtttgattttatttaaatcattatttctgattactgataattcagggggaactgatgtctgggcatgccaaagaattctagcacctgaaatcaacgttatcatcaaaatgattatgactaacgacggaactaatctccagaactttcccatatatttagccccaactgaacataaatgcgctaaataaagtgctacaaaaaagcaaaaaatatttaaaaaacgaccaggatattgaataatgctgactggtgtttgctgcaatgcccaccacggtataaccgtcgtagtcattattaaaatcactagtgaaattatccctatcgttcgatataatgttttttctaaccagactgtcataagtattattaccaccgtgctcagaaaaacaatccctatcgtataggttctaaaatctaatgaaaatgaatacctaattaattgttctaagctcttggttacttgcttaaaatcaaacggttgaggcatattaattgtttgaaatcttttttgttccaacattggtccccaataagccattgtcatagtcaaacaaccagctacaaataacaaaaattttttcgttatatagattaagtaagtacgattaaattttttttgaactaaaaagctgaataaaacacagcataaaccaaaactagtcgttacaatagaaagtacatgagaatacaaaataagactaaagaaaataatcacccaacgtaactgttttggctgttgtcgtaataaattataaaagcacaaaaataacggcggtataaatatgtaagcaatgtattcacctaccccccaacggtacattacactagtattacgaatgaaagaaaaagtataaatcaatgcaaataatatgccaaataactgttcccctgagaatttaattgctgatatataactagaaactagtgttaaaaaagttactaaggttagagatagtaaaaatccagataccggtccgaatattactgtcaataaatgcatcgggtaaattgtcaaccatggatagaataatgctgtggcatttccaacaccgccccaatcattaaaattgattggagaataccaaatatgtcttaatgataaagcgcgattcagatgaaaataaccatctaaactatcgcgagcaattaatgtatgctggggtgccatcaaataagtataaaaaatacttagtacaacgaataaaatgataatacctattaatttattatttttcttaacagctttaaccattcagtcacctttttttatctaccaatttattttcagtctaattataccccaaaaaagcacaaaatgcaccccgatttaatgggtaacatcttgtgcttttccgtagttatctttccaaataaaattcaaatcgttcgcccacatattgggtgcggacatactcgaaaggttcgccgtttgataagaaggaaacttgtcgtaatttcaagattgggccattacgcttaatgtcgagatattcggcaattcgttctgaggcgagttgggctgagacggtttgttgtgcgccgcccatttcgtagccccctttttcggctaatgctttatagaaggaagacgtgatttcagctttactgaaatctgcaactaagctttgtggcacggttgccacttcaaaacagatgggcacattgtcggcatagcgaatccgttccatgcggagcacctgctcgccatcttttaactggagcttttcagcttcgctaagtgatgggttggcaatgtggaacgaaatggttttactagatggctgcttaccttgggcagtcattagatcggtaaaactagtgacgccggacattttttcttgcaccttttggttagcgacatatgtcccggccccgatgcggcgttccaaaattccttcgtcgactaatgtttgaacggcttgtcgtaacgtcattcgcgacacttcgaaatttaaagcaagctcccgttctgaaggaatgcgatccccaatcgaccacttgccggcttcaatatcttttttaagttgattatgaatttgaatataaacaggtgattccatgggtcacactcctattgattaatgttggtaatcttggccgaagctgtaagttgccactaagttttgttgttggtctaagatgtttaaatcagcatcgcgaccaacttctaatttacctttttgtgttaggccgaattcttcagcttggttaacacttgacatcataacggcttcaaatttatcacagcccgtgaaggtttggatattcttgaaggcatcgatgtaagtcaagacagaaccagctaatgtgccgtcttctaaacgtgcttgtttgtctttaacgattactttttggccgcctaattcgctttcgccttcagcaatccctttggcacgcattgagtcagttactaaatcgatacgttctgcacctttttgttcatatgctaatttaatcatatctggcacgatatggaaaccgtctgcgattaattcagcatacatattatcttctaacattgcgtgacctgttacaccaggttcgcggtgcttgaattcacgttgggcattgtataaatgcgtaacgtgagttgctttactttcaatcatttgttcacgtgtcgcattactatgaccaacagaaggcacgatgttgtgtgctaaacagtaatcttcgaatgcttttgaaccaggatcttctggtgcgtaagtaattaaacgaacgcgattgcctgataatttgttccattcgtctaataagtcaacgtctggatctttgataaattgttcaggttgagcacccttaaagattggggcgataaatggtccttctagatggacaccttggattaatgggttcttttcagcagcgtctttaacaccacgcatggcattggcaatattttcgtttgattgtgtcattgttgttgcaaataaagttgtgacaccttcgttttgcatcatcttagttgccatttcgtcgatttggttagcatcgccatccattgcatcgaaaccgtaaccaccatgacagtgaacgtcgatgaagccaggaatgatggtttgacccttcatatcttggatttcttcgccagcttgtgctttatagtcaaacattgggccaacagctaaaatttgtttgtcaaaacgaatatagccgtcttcaataacgtcatcaccagtatagattactgcatgttttaaaactttgattgtcattatccatccacctctattattaaattacttccagtataaatggtatagaccaaaaatgcaaggcactcggcgtgatctttgaaccgttttcttaaaaatttggtatactgtccttatcaactactgtgaggagttttaagcatgctaaatattggggttatcggtttagggaacatcgcgcaaaaagcttatttgccagtgatggcacaattacaagatcaagttaactgggttttatgttcccgccaacccgcaaaactggcacaactgcaggaccaatatcactttagcaatggctgtctctcttttgaagatctcttggccaaatccttggacgccgtttttatccatacacctactaacactcattatacacttgttaagcaagcactctcacatggattaaatgtttttgtcgataaaccactcagcgagaatccactggaagtcgccgaactctataaattagcggcacaacaaggcctattattaaccgtgggtttcaaccgtcgttttgtgccgcaattacaaaaattaaaaagcatccctaataagcaactgattaacgtcactaaaacgcgtgtcgatacacggcaaccagccgcttttgcgatttacgatttaatgatccacaccattgatacagccctttatttagccaatgatgttggtttgaacgataacgtgcaaccctattgtaaacaggatgccaaccaacaattacaagtcgcccaactaaccattgaaacggccagtcaactcattaccgcaacattaaatatgcaaggtggcactaaccaagaaatcgctagccttcaaagtccgcacggcttattctccgttgataatctgacgcaatataccgccaaaacggcaacggataatcggcaacaacaacccgcagactgggaaccaacattagtcagccgcggttttgacccaatgatcaaagcctttattgcggcactgcaaacaaacggtgaaaatcccgtctcacctgccagcagcttattaacacatcagttgtgccacacgatgtgcagacaagcgcaacgttgttaaaaatatatagaaaaaagccaatcacaatgtgattggctttttgtgtgcttagatacattctaatttgagacgtgcttcctcaaagtcaattcgttcgagtccgcacgctatttttggctttccaagtctttttcaattgttgcgtcgatgcctttaaccactgctgacattaaacctgcttcttccattgctaacaagcccgcaacggttgtgccacctggtgatgataccttgtcgattaagtcccatggtgaatcgtcactcagcagaacattttgggcgctccctaaaacagcttgggctgcgatttcagttgcagctttcttggttaaaccgtgtttaacaccagcccgtgccattgaatcgatgaataagtaaacgaaagctggtgaactaccagcaagtgcgctgaaagttgtgaagtctttttcaccaatttcaacaacgccacctaattgtgacaagacgtccttcacgctcttcaattgatcagcactcacttgtgcattaccgacaacggctgtgataccggcgcggttagcaacgttaacgttgggcataatccgcaaaataggtagattatccgcgtccacttgttgacttaatttagccaatgaaagaccggctgccattgagaccattaatggttgtttttctttaaaagcagcgcttgtttcttctagaataagtggcacaatatatggtttaaccgccaagaagacaatatcagcttgtgcgaccaccgcgatgttatctgccactggtgtaatgtgttgttcagccgcaaatgcttcataatttgccggatgagccccgtgaaccaaaatatccgttgttgcgatctgatcagctttcactaagcctttaataattgcttgtgccatattaccgacaccaataaaaccaattttcattctgccacccctttttgtattgaaccaagaataccgaaagaaagtgttaaagtcaattaacaccatatctatctaaaaacagcacctgacaaaatcaattttgccagatgctgtttcatttagaagcgtgctaaagttttagctgatgccttcgttgtttgaaccaattcacccacaacgactgttcgctcgtaagtctgaccattgactatctcgccatcaggatcacaggtatacaaagtcactaggcgtttttgccggacatcatccaaaatagctacttggttggccttaaccgttttgcgactgatgacgcgataggtataaacctgcttcgtatcggtcaaataaatcgcggcgcccactttcgtttgaccgagtggtgaaaacaaaacattttcctgggcaatatcgtgactactcaaaacataattccgcttgcccattgtctgtccttgtttattggtaacagccgcctttagcatattatcgtgcccgtttgtttgaccaatacctttgataatcggcaatttaatgccaactgagggaattgccaacttaccaaccgtaatcccccgcgtatcttcatcccaataagttggttgcggtgcattatcgtccgccgtctttttcgtctgaactggtcgcactttgacggttcgtgctcgggcgatattttgcgttaactgatcatgccgatacttttgaacacccatcaagcctagaaaaagacaaagtgatgctataaaaagccaacgaacccatttcactgcagggggcttttattgtccttttatctaaaaaaacttatcgacgaattactaacatttgatgctgacgaggcaaacgaaatcagtgaattactattattacttgttagacgaatgaaataaataacaaaaaagctggtgaaaattaattcatcggccttttttgttacctattatcttctctcaaaaccactctttaaattaatactctcccttggctatacatgggcccgtgaagtttataaggcacacgacggactattagtcggatttcctttaacctcttcagattcgagttctggggcttacctgaagcgcgattaaatcatcttttttaccttaaaactcagaactgctatcaataatccgcgcacgcttattctataaatgaataaagcgtgtttttttagtcacaaaaaaacgcaccgacaattgtcggtgcgcttacctaatatattattgggctagctggattcgaaccagcgcatgacaggatcaaaacctgttgccttaccgcttggccatagcccaatcaagtggaggagagtggattcgaaccaccgaacccgaaggagcggatttacagtccgccgcgtttagccacttcgctactcctccatatgtctgtctcatcgattcaactatattagtttacaaaatttccagacaaaaatcaaccctaaaatgcaaaaaaaacctcgattattgtataaataaccaagatttcttttaattaatttagtcaacgccttccattaacttatgaattggtttcacgaagaaaattaagacgatcccgaagatcgcactaacgatcccgatgcctaagaagtatttaatttcagtttgtggtgagtataaacgaactaactgtgcgttgaccgcttgaccagcagcatcagctaagaaccacatactcatcatctgtgattggaatgcttttggtgctaatttagttgttattgaaagaccgattggtgaaatcaacatttcagcaatttcaacaatcacccatgagccgattaaccaaaatgggctaacacgtccagcagtcccatgtaataagccaggaagcgccatgaacatgtatgaaagaccagcgaagattaagccaacagcaaatttaccaggtgctgagggttgcttcttccatgaactccacaaccaaacgaagaacggtgttaatagcataatgaataatggattaagtgattggaaccatgaagcagccaaattaaaatgaccaatgtgtaaaactgtacgatcttcagcaaacaatgccaagacaactgaacctgattcttcaataccccagaaaacagcggcagcgatgaagagtggaatataagctaaaacgcgtgaacgttcttttttagtcactttttgacttgctaacatccgatagaaatagataattggtaaagcaatcgcaacgattgaaattgccaaaacgatattttcaatgtttaaatgacctgtaaattgcattgctaaaacaataattacgattgcgataataccaagtacaattctgcgaattacacttgttaattcttctgcagcgatcggatcattaggacgcgcattttctttattaaattgtgaacgaccacgataatattgaattaacccgaagaacatcccaacggcagctagtgagaaccctaagtggaaattcatctgtaagccgacggtcccaacaatcaatggtgcgacaaatgatcccaagttaatcccgaagacgaacatactgaacccagcatctcgacgacgatcatcttcactgtataagctaccaaccatttcagaaacgtttggtttcaataacccagttccggcaacaatcaagccgattgaaataaataaagcagttgcgcccatcggtaccgctagtacgatatggcccaacataataaggaccccaccgatgaagacggtcttaaagctaccccagattcgatcactcaaccaaccaccagcaacactggctaaataaaccatcgaaccatagatcgccatcactgacatcgcagtcgtcttgtcaaaaccaagaccacccttatctaaagcaaaatacatatagaatagtaaaattgcacgcatcccgtaataactgaatcgttcccacatttctgtgaagaataatgtcgataggccgtgcggttggccaaagaatgtcttttcatgtttctcttccattgtaataccccactttaaaactttattatttttgaaactaggaattgacagctgttaagatagggacttcaatggttgaaatcggcactatacaagaactctcttatcattcgcttagaatctataaatgacattataatcttattttaatgttaaagcaattcttttttttatttttatgcactttacgatcaattttcaaatcatttttcacttatttcctctagaaatttaatgattaatattagccactttcagctattttcagacaccattttctcagcaaataaaggcgcattaatgttaaattattgcattcattattattacgatgactatagtctgatttaagtatcaaacacacctccaacctttgtagtacaatgattagatagaaagtaggtcgaacattatggcgcaactcaaattagtgacacttaagaaattattagcggatcggtggcttaattattatgaagcaacttatcaaaattctaaacaagaagagattaattatcattttgtcagtcgtgaagccaatctaacaactgacaaccttaaacatcctgtgacggcttctgcggtcaccatgttttgccttaatcgtgatcatagtcaagtcttattactacgtcaattcaggctccctctcaacgactatgtctatggtaattcagctggtttaattgaacctggtgaaacagtcgaacaagccattgaacgtgaactcgtcgaagaaacaggctatcaaggtgttcatattgatcaaatctttaatcctagctattctacgccgggcattacagatggcgccatcactttagccatctgtacaattgatcaaatcccttctcaaaatacggttttagaatccgctgaagaattgactagcatttgggttgataaaaaacaagctgctgaaatattagcaagcggtaagatatcaggccgaacacaactgctattatggcaatgggttaataatcgcttaaactaaaataagacattgtttccatttggaagcaacgtctcattttttatcctattaagcggtaataaaaaagcactgttagtcttaacgactgacaatgcttaacaagaatcacatgcataacacttagtgccggctgcaggagtcgaacctgtgaccctcggtttacgataccgatgctctaccaactgagctaagccggcataaagatgacccgtacgggatttgaacccatgataccgccgtgaaagggcggtgtcttaaccacttgaccaacgggccgaaaataaaaaacgattgaagggtctcaaccgctcattttaacatagtggtagcttaatctgaaacgttatacactggcaaattaagttatttatagcccgtagaattaagtcgttttgaaaagatgaagacgttacaatctaccaattaaataaatctacaattgaattttatttaccttatgaagatgttcaaaacgcgttaaaggaaagtgcgcaaaacccctttatacgtacaaaggatgaatgggtagtgggtaacaatgagtgtaaattaaataaggcacaaaaaaggatgcttaaggataaagaaatatataatcatttcaatttagaaaatattcccagttccatcaaaacggagctaaacaagatagtgcatggcatcgatgactaatactttaacaccaaacagaaaggggctatgagtatatagggtctataactaacaaatcacccctcgaaaacattgaaagaataacccccaatatctataatatagatgatgggggttatttatatgtttatataatttatagtcccttggtaagaaccctatttatattatttctgcttcaataatttttatatctttttcataatctctttctgaataattctgttcaaatccccttaataactctgaatttagtttcttagctgacatttccattccaatcatagttatacttcccgaagtaaccccaccaacgactggaacaattttcgcaattccagaggctagtccctttttggttagtgttttgtcagcaactatcctagttattttttttaataatgggtaccacaaagttttcattaagggtttccctaatatttgtttagaagcatactttatagcattagaacttgacacccgcaacaaagaagctgatccatttactccagccattgttcctaaaaataataacaatccatttgtttgaatttttccatcttcttcgatcaaatcatcaaaatcatatatataggctaattgttgagccaatctgatggagtaaaccatgttttgaataatatcgccgggtattgtccctgctattgcaattcccccgggaattccagtaagaaaagaaataacagtagtatttcttaccgttgctgtaatttgtttttgtgcaactttttttctttcttttaaggaaatatctaagtgcccattgataatatctgattctgttactttaaatacttttgctaaatattcagatctgttaacatgtgcaattggattttcaacgactaagtttaagagtgagcgaaaatcattattggtgattgcttctaacattttattattatttaatgattgcttacctgaatccattatttctagctccttagcattggtagtttttaattatattaccggcataaattgaatggttaatcgctgattagttgcctgagcaatctcagataataccctagtcgaagcattcatcgatccattttcaatcctagcaatggttgattgtggtttaccaattagactagcaaatgcacgttgactcatacccatattttcacggagatcacggactttaactgctacctctaaattgatgttttcttgttcaacgagttttgcaaaatcaggattgtttttacttctttcagtaacatattcgtcaattttactcattgttggtcctccttgttaaaatacttgctgcgtcgattccgagcaattttcttttcactttctggtgtttttttcgtttttttagtgaatgcattggtgattaagtactgagatccttgtaattggaaatagatagctctctgaatatttgaagctctcttagaacgaatctcatagaggttgttttctagctttttgacccataattgacgttctgcgatgattagaccgttattttcaatattttgaatggtcgcaattaatttggcagcgtctttatcaggtaattgattcaaaaattgtttaaattcattccagtcataatagtcaaattccatttctttcatattcacatgatagcttattggctatcgaaaagcaaacaaatatgttattacacaaatccttggtacaagtggaagtgtgaaattcatatttccgcttgtaccaagggattacgtctccaccaacgaggtgatttttatatgcaacaaattgtcctaccaatcaaagattcgaatgtacttaatgatgttcaagatactttactcaacaactttagagctggccggcgtaactatacagtttttcaagttggcaaggcgacactattgcgagtcagtgatgtcatgtgcttaaaacagatcgacatttttaatatggacggtacaattaaacaaaatacgttcattcacgatcgaaaaacgggtaagcccaataccttgtaccttaaaccagtccaaacagagctcttattgtatcgccaatggctacttgatcatcagctggattctgaatggctctttccctcaattcaacaccccgagcgccatatcacggaaaaacagttctacaaaatcatgagtaaggttggtgagctgttaggcattaattatctaggtacccatacaatgcgcaaaaccggtgcttatcgcgtttacacgcaatcaaattataatattggcttagtcatgaatttgctcaatcattccagtgaggcgatgactttagcttatttaggcttagaccaggctagtactgaaacgatgctggataaaattgattttggttaggaggttgtccttatggatttagattttaaatcaaacaagtatgatctttttgatgattggcatcaaaacaagactaaacaagcctttacacaaaaattgcaacaacaagctcaaattgaaaaaacacacctgccacaattattgtcgcgtgaagatttaaagattcgttggcagatgaactctcgtcaaagtgttcaccaagttactagtaagcctgattttccacaacccgtttttgcttttaatcatggtaagacgccactttacttagaaactgaaattcaaattttcgaaattaatcacccctgggtgataactcctggtgctcggcttgcttatagtcattggattcttcacaatgtgattggttaatcttgagatttagctctaggatttttatcgttggcgctagccttctaatacaaataatccccatcaaaatggggattaaatttacccttgacacttgtcaagggtgtaagtgcgcattgacctcgttttactcggtctgctgataaccgtaaaatcaatttcagctgttgttgaattgactgtatttttaattcaatttatgtttgcacctaactaggattgttatgttttaaatacttaaaaagtgttgcagattacgctgttttaagccaaaattttttagtcgctttgtgcagataatctttataagcttgataacaaattttgaataacggtgttgtaagatctgtaaatctaaactgaaagcattattttgatgttaggagtcattaagattgacgaaaagtttgaagcttctttcaatgaacctgacgagatcaaaaagaatttgtatgattccttatacacttatattttgcaaaaaagacaagaagatattattaatcgtcctgacttcgttatttagccctctaaaagcctgctgagggctttttatttttgctttggtataaatatatataaacagtctcaaaatcgctagaaacgagaaataaggcccttaaaaaagaatatagcagttaggttcttgttgaaattcaaaaaaaactaactatttgctgtcaatggtggcggacaatcaatgcgtgggagcatagtgacttgaatttaatgtgagccgatttttgagtcgctcctttgtgttttttatttgaggtttggctctggtacagtagtacctcttttaaacctcttttataaacctcttttaaacctcttttagacccctattgaggcttactctcccaagggttacaggagtttatagatagagttttgtctgtttatagatagagttttgtctgtttatagatagagttttgtctgtttatagatagagttttgtctgtttatagatagagttttgtagtattatatattcataaaaccatgttcattaaaagaggtgttttatttgagtaatgaaattgttaaatatgatcctgaattaaatacaatcccacttcgaaaattcactcctgttgaaatgaatttattcttctcaatagtttctagaatgcgtgacaagggtgacgaaactgtaaggttttcatttgatcaattaaaagaattaagtgcatataaacctactgcaaataaccgatttattgacgatattgagagtacttatcaaaaaattttaggcttacgctttggaaggcgtagtaaagatgggctgcatcgtgaattttttgttatgtttaccgaatttgagataaacggccatgctgatgatccttatgttgatattaaaatttaccccaaagctataaaattattaaatgagctggaaagttgggttcgttatgctttatcagaattcagagatttaaaaagtagctacgcaaaaaccatgtttcggttactaaaacaatttagaactactgggtacgcttacttttcagttgcggactttaacgagctattagatgttcctaaaagctataaaagtagcaatataaatcaatccattttaaaacccatcaaagaggaacttacgcctctttttagaggcctaacggttagaaaaaaatatggtaagggccgcgggaaaccagtgattgggtattcttttacttggaagcctgaaaagaaagacgctaacgacttctcacaaggtcaatttcaagatgaacgtcaaaaactctttaacattcagcataatggtgaattaacagaacaggaaaaatggcgcgccattgacaaagttaaggggttgactttaggctccactgagaaacaagcattggctgagaaacaagcggaacacgataaaaaaataagagatcaagcaagacaagaagcacttgctgaactccgaaaggggtttggaaatcatgcctaaaactattagagaacttgctgatgaattgggcgtttcaaagcaaagaattcaacaaattatcggcaagtaaaacaccaaataaggaaggcaatagatacgttttaaacgcccaagatgtcaaaaatataaaggatttgatgggttttgataatgacaagtcatcgacaagtgaatcgacaaatagacttgtcgattatgatgtttacttagatgtgatagattccataaaagaaaaagatgaacagtggaaatactttccaacaccaaaaattctagacccgattatttttgttaaacgagatttctatatataatggaattataaatttactgttggaggtttttatgactgatttatttgcagatggtactatctctatccatggagctcaagaaaataacttaaaggatgtcagtttagatattcctaagcataaaatgactgtatttgctggcctttctgggtctggtaaatcctctttagtttttgatacattagccgctgtttcccgacgtgaattgaatgaaacttttcctagtttcacccaacaatatttgcctaaatacggtcaacctgaagtgaaccgaatcgacaacttaccagtggcaattgtggttgaacagaagcctattggtcgtaattctcgatctactctggcaacctacaccggcatctattccgtcttacgtttgatgttttctcgaattggacagccttgggttgggtattctgaatggttttcctttaacctacctcagggaatgtgtccaaaatgtcagggattaggctttgttgacgacatagatgaacgtcaattaattgatcctaataaatcactcaatgaaggtgcaatgacttttgccggttttcaaccgggaacttggcgttggaaggaatatggcaacagtggattatttgatttagacaaaaaaattaaagactacaccgatgaagaatatgatttattcatgcacgctccgcaacaaaaattaaaaaatccaccggcaaattggggccgtacggcattatatgaaggactagttccacgtatgctccgctctgttattcatagtgcctcaggtcgtcatcatgaagctgccttatcaaagattgtcactcgaaaaccttgcccagtatgtcatggaacacgtctgaacaaaaaggctctaactggtaaaattgctggcaaaaatattgcagaagtcagcgatatggatttagtaagtgtcctaaaatttttggataatatctcggaccccaaggctaaaacaatggtgcgtgaactacatagtaaagttcaagctttggtcgacatcggtttaggttatctttcccttggccgtggaactgatactctatctggtggagaagctcaacgaattaaaattgccaaatatttgacgagttccctatccgatttagtttacgtactcgatgaaccaagtgtaggactccatcctcacgatattaaattaattacccaatccttaaaaaagctcaaggaacatggcaataccattatcctagttgatcacaaccctgccattatttcgacagcagattatgtcgtggaaatgggaccacaagccggcaaaaatggtggtcaagtaactttcactggtacctacgaccaactattacggtcagatacgattacgggtaaaatgttacgagaaaaaatcactttcccaaagcctcgtaaacctcaatcttggctaaatgttaatcatgtaacttctcataatttaaaagacgtatctaccagaatccctcaaggtgtaatgaccgtgatatctggaccagcaggttctggaaaaagtactttagtccaagctttcaaacaacaagtttctgatcaagactatattgatttgagtcaggattctgtaggtttgaacattcgttctacacctgcaacttacttgaacattttaaatcctctacgaaagcttttcagtaaagccaacaatggcgtttcaacacaactatttagttataacggtaaaggtgcttgtccccgttgcaaaggtaaaggtgtgatgatcaccgagatggcattcatggatccaatcgttcaagaatgtgagttgtgtcatgggaaacgttatagccaagaagcactacaatacacttatcatggcaaagatatttctgaggttctaaatctttctatcaacgacactttagagtttttcaaagatgtgccagatatctacaaaaaggttagtctactccaccaagttggacttggttatttgaatcttagccagtcgatgaccactttatctggtggtgaagtgcaacgtgttaagttagcaatggaattgaatcataccggccgaatatatttcttagatgaaccaacaaccggattgcacttacaggatactcaacaattgatcgatttatttgaaggattggttgataagggcaatacattaattctgattgaacataatctgaaattaatttcacgagccgattggttagtcgatatgggacccgatgctggtaaattcggcggtcaagtttgttttgaaggtcatccaaaagatagcctaaacgataaaaactctcggactggtgctgcattagcagctataatttcttaaaagattcaaaaagatcacctcatttaaagtgcaacacaaaagttagacaaaattgaatatttttaaactgctaaggcatgttccctgtattcgcagggagtcatgccttttgttttctgtgatattcgtcgattgttaaaccaatcgacgtaattctttgtaatttccttgaattctccaatatctttacactgtggaaatccattaagacattctgttttaagaagatgaaagaagctttcaattggcgcattatcaagacagtttcccttacgagacatgctttgtataaatttttttcagagagtttatcggtatagtaattcaattgataatgccaaccttgatctgaatgaattattggttttattccttccggaatattttctgtgagttcatcgagtgtattcataattagtttactgttaagattattacttacttgaaatgctaaaacttccttgcttgcttcgtcagtaatagctgaaacgtaagcccacttagtatcggccaagcgtacttgtgtaacatcggtatgtaatactttgaaaggtacggtttcattaaaatgctgatgtagaaggttacgggccacttttccaactgtacctttataagatgaatatctaccatttctgtggcggttataaaggcttacttgaacatttaattcatccatcaaacgacgcactacggcgtctgatagatggatatctaatttaatgagctcttcttgaacgcgacgataaccgtaggttagacgtccgcgatatcttccgctttcggcaatttttagtatctctacttttacatcttcatacttatctacataatttttgatacgtttacgttcatcatgataagtcgctttcttaagtccaatggtcttaagaatatcgccgactttataccggttaaatttcggaagagactcttgttcgaccctgatctgatcaactatttgtgttttctttcgtcctttgaggttccgaacagggtcattgatttttttaaggtttcgttctccaattttgcatcatataattcttgattctttttcgtcaattcttcacgaagttgatcgatttcgttcttgtttactaacttacgtaatttcttcttaacactttatttgctggctctgttttttctcattgctttattttagacaattttacttcaatgtaggcaaaagaattcacagaccattgccattaattgataacgtttttcagatctcctgataaatatgcttttatattatcaacagtcatatgcaacaaccgatctcttgtctcatatggtgcccaagcaatatgtggggtaatataacaatttttggcctgtaataatgggctatcactagcaatgggctcccctttaacaacatcagtggcgtaggcataaattttgccttcattcaaggcattcctgatgtccgcttcattaaccaatttgcctcgggccgtattcaatataataaccccatttttcatttcggcaattgtatcattattaattaaatcaattgtttctggtgtttggatcacatgcagactaagcacatcagattgccttaatagttcatcaaatgaaacctgctgaatccatggttcaggaacctttttaggacgatgattatagaaaataactttcatagaaaaagcgtgtcctgttttagcaacttcttgcgcaatatggccataactgattagccctaaagttttgacttatataaaacaaggtgataggctgtcttcagaatctgaaaatatcacttttacaaaaaggaggaattttattatggcaaaatcagttgcagttttggtgactaatctagtcgaagacgttgaatatactgaacctgtggaggctcttaagtctgcaggacacgaagtgacaacgatcagcttcgaaaaaggcactgttgaaggtaagcatggtactcaaattaacgttgataagtccattgatgaagtgagtcctcaagactttgatgccttattcattccaggaggattttcaccagatcaattacgtgcggaccaacggtttgtcgaatttacaaagttctttttggcaactaacaagttaacagcaagtatttgccacggtccacaattaatgattcaaaccgggttagtgcaaggtcgtacaatgacagcatatttaactgtacaacctgatttgtattatgccggtgcacgcattgaagacaaagatgttgtgatcgatggtaatctaattaccagtcgcgaaccaaaggatatcccagcatttaatgatgccttcctatcagctttataatgttgatattgataagcattcaaacctatagcttgatgagtttgcctcttttaaaataaatttttaaacagttaccgttaaagtaacttattcctcgtgttagtaacacggggattttttatatagacgtttttaaacccccgttgcgtaattaaactgaacttatatttctaaaacatactaattaataaaaggctagttactgaccaatttttggttagtgactagccttttattttattcataagcgttgttgtaactgataagtaatatcttcgtatcctggcttccccaacaatccaaacatattgcgcttatatgcctccacgcctggttggtcaaatggattaattccattcaagtaaccagaaatggcaacagctacttcaaagaagtagatggcttgtcccaaagcaaattcattttgcttgtccacctcaataatcatgttaggtacaccaccgtcaacggggggcaacaaggttccttctgaagcagtacggttaacgtagctcatcttctcaccttgcaagtaacccaaaccgtcgtcagaatccatttctggaatcacaacgtccgtcactggctcagttacgcggaacaacgtctcaaacaagttgcgacgtccgttttggatgtattgtccgaaactgtgcaagtccgttgagaagtttccagtcgctgggaagatacccttgccgtccttaccttctgactcaccttgcaattgcttccaccactcaccgaattgaaccaacgttggatcatagttaatcaacaattctgttgtataacccttccggtacaagatgttacggtaagcagcgtattggtaagccggattatttgccaaatcggcatcagcgtattccgcttcaccagcagctgctccagtcatcaattgctcgatgtcaccaccagcagttgcaattggcaacaaaccaacagccgtcaaaactgagaatcgtccaccaataccatcaggcacaacgaactcttcgtaaccttctgtatcagccaatgtcttcaaagcaccacgttttgcatcagtcgttgcatagatgcgctcacgagcgcctgcaacaccatatttctcttccaacatttgcttgaacacaggaaatgcaatcgctggctcagtcgtcgttcctgacttggaaatcacgttaactgagaagtcacggtcgccaattaccttgatcaagctgttcaagcaagctggtgcaattgagtttccagcaaacaaaacttgtgggaagtcacgttgcgttgctcgtctagcaagtagttgttgaaatattcgttcaagaagtcaattgccgcacgagcgcccaaatatgagcccccgattccaataacaaccaaaacctttgagtctgattggatcttctttgctgctgcttgaatacgagcaaactcatccttgtcgtattcagttggcaagtgaagccagtcagtgtaggttgaaccagcccccagtccccttacgtagcatttcatccgcaactgtaaccattggttgcatcatggaaatttctgcatctaaaataaattttttctagatgttgggtcttaaattttaatatagaattattcaagattagcatgcctcttttttaattcgaattcggaaatattaaatttattcatatagttcatgacaaataaatctccatataaccaaacagattgttcaaataaacttcccattggctgttgtgttatgtcgttattagtaaacttacttttacctgatagtatagtgacatagtctgcttttttatagattgtattatgcgtggttgtactccatagccaaactttcgcaccaatattttttgcagtatcaacatattgaattaattgactcgtttctccagatgaagaggcaataattaataagtctttatcctgaatagcaggtgtagttgtatctcctacaaaaaaagtctctttacctaattgcgcaaggcgcatagcaaaagcctgtaatgctagtcctgaacgtccaaatcccgtcaaaaaaattctattagttgaattgataaccactaataactcatcggaaatatttttatctgaattattatttagttcataaagtatgctttcccaattcataacaaactcctatattatccaagtaatttcttgaattcagctgcggctgtggctggatcatctactgtagaaattgctccaccaataattaatagatctggattagccgacttaatttcctccgctgctgttaatttaattccaccagcgattgcggtctttgtattagaaacattgttcttaatgatattaaaggtttcaaagggatcttgacccaaggcttgtagatcataccctgtatgagtgccaatataatctgctccaaaagcatctatttcacgagcacgggttgcaacgtcttggaccccaatcatatcaaccaacaactcttttccagcttcatgagctgcttttacagcgtccttaatagattgatcttcggcaacacctaaaatcgttgtaatatcagctccgtaagcaaatgcctggttcacttcatatgaagcgacgtccatgattttcaaatcagcaagtaacgtaatctctggaaattctgcacgaattttttttagtccttcaagtccaaaattaattaccaagggggttccatattcaaaaacatcaatactatctttcgtcttttgaattaaatcaatggctccttggacatcttctaaatcaattgctaattgtagtttcataataaaataacacctttctttttaagaatatatatacattatttaccttactggtaaaatttaatagagggcacttcaaagtaacctagtgtctctttatatttattgttcataaaggagtagtatgatgccagattattttcgaaatactgttatgaaaaaacttagtaatggtgattttgattgtactaaagaatttacagtatcaatgtttagcggtaagcataaattattaatattatggatcttaataaatgatgggccacatggcttttcatattttatgaaaaatctgaagggcatcagtaaaaaagttttatcaaaccaactgaatgagttaatggcggaccaaattgtttataaacgagaatacttaactggtaaagtaaaacacactgaatatcaactaacggatataggagaaactttaattcccatcatagttgctttaaatgactggggagaaaatagactaaagcaggttactttagtgaaaacttttaataatgatttatagatttttatctgctgtttaagatgccagcagcttgccccacgcgggcagcgttctgcatgacatgctctcactgaaagtgatcatgcaatgataaattgccccgtcatggcgtgacccgccggaggttttacaagccggataataggcgctgtaaaatagcagtttccccagtaggaaggggaaacgctactgtcagcgcttgtcgatgacacgcctcgcagagcctgtccaaaatagcattttggtataaaaatctataccagatttttaacggtgttatactggtcttggaaaacctttttcgaggaggcatttttgatggcgcatttaaagaaaaatacgcgtggcgcagtccctggtttagcggtccattttgaacgtaaaaccgatcatcatactaacaaagaaattgatgtgtcgaaaacctatctgaatcaagagctcatggctgatggttctgatatgctctcacgattcaatgcgcgtttaaatgacgtttattgcatgaaaagagacgatgtaaaggcgttagcgacttggattgtcactttacctgaagaactcgcagaagcgccctacgagcaacagagcgccttttttgaagcaaccaccaattttcttaatgaacgttatggtcaagaaaatgccgtggccgctgtcgtgcattatgatgagaccacccctcacttgcactatgcctttgtcccagtggtttttgatgataaaaaatcacgttataaagtatccgctaaagaagtgctaacgcggcaggatttgcaaacctttcatgaggatttagatcagcatttaaaaaaggagctgcccttttatgaacaagggattttaaataacaaaaccttaccgtttgagaatgtcgctgaaatcaaaaaatacaatgatcagtttaacgtcttgaaggatgaactagctgacgttgaagaaaatattagggctaaacaggccttactcacaattacagatcaagccttaacagaagtagacttagccgaaaaacaaattgaagattttaaacaagacttatctaaaaatctctttggtaagacggtgctcaaacccgatgacttagatcgctttaaaagcgtgttagccacaatgaagaaagccactttacaaagccagaatgagacggaacaagttaagcaagtattaggacaagtcgaagcgcaattagcagctgtccaagaagactatcaaaaactgaaagcagcacatcaaacgctgcaggcagctcaacgagaaaagcaaaagatggactatgtgatgcgcgatatgcttaaaaatgattatggtgtcgacaaactatcccttactgatgtggaggcccgctatgtcctttataagcttgatcatgaagaactgacaaaaaataagaaaacggcccagtcatggttaaaaaccttgacgacagctagagaagctccagatacgaaaatagcgcctagtagattagattggggtattgaacaagttaaagcattaatcaatcggatcattgaattaacgcgtgatatttttaaggggccaagtctttaacgttataacggcttatttgcccgtataagcgtttttagccatgtgacgtagaaataatcattaaatagattaaaacgtcgctatgggattaataagtggcaatcaggttacataaccagtaatccatcatttaaaataattccaaacaaaaagaacactctggacaaacattatgtacaacggtgttctttttgttttgtttttattaattcaataaaaaggcgtagcctattataagtatatcttttatattttaatcttttgttcttttgcgtagttataaatacagtaataacaatgcattcacgtattatatagccacaaaaaactgtgtatataaccacaaaaaactgtgtacataaccacaaaaaactgtgtatatagccacaaaaaaataaaataagtggctatataatgttataataaaagcataaagaaattcccgtctaaaagtttttctttatgcttatccaacaacacacccaaaggagtgtatttatatgactattataccagaatcaaagacaaggcaggtacagaccttgaatgaattatcaaaaagaaaagtcgttgaacataatagtttaataacgtcgattgccaagatggataagacaccactcaaaatgtttgaactagcggtgtctttaattgataccgacaatccacctcaggatcagacggtttatttatcaaagaaagaaatgtttgctttctttaaagtggatgacaacgataagcatagtcgttttaaagaggcaattgaaaaaatgcaaaaacaggctttttttcagattaaaaaagaacaagataaaggttttaagtttgttagcattgtgccaattccatatgtagaatggacagattatcatgatgaggtattaattcgatttagtcctgaaattatgccctatttaattaatctcaaaaccaattttacacaacatgccttgtcagaaatttccgaattgaatagtaaatatgccgttattttgtatcgttggttatcgatgaattacaaccaatacgagcactatagtgttaaaggtggacgccgagaagaacaaattgacaggtaccgtaatcctgaaattggtatgaaagagttacgagaaatgactgatacgataacagaatacaaacgattcactcactttgaaacgagagtattgaaagaacctctagcagaaatcacaaatcataccagctttaatgttatatatgaaaaagttaaaaaaggacgcagcattgaaagtattgtctttcacatcactaaaaaccaagtcgcagatgatattagttacaaattagatgatcccgtttatattgacggtaagataagacaagaagaaagtgaaaaagatcttgtatatgaagctatgaagagtccatatacaaaattgttgatggaacatttcttgttgtcatacattgatttgacggatacggctattttgtcagggctacagaaaaatgtttatccactttatgacgaattaaaagagttacgtggattaaatggtgtaaaagaacacttagcatatattcgagataaacaagatgactattcgaaaaacaatattgctaagtatcttaaaaaatcgattgaacagtatctaccaatcgttaaaaggcaggatatagaccatgagtgaaaatttaaaaacgattcgagaacttgctgatgaattgggcgtttcaaagcaggccatatggcaaaagataaaaagagatacgtcaatcgatttacgtcaatttacatcaacaaaaggtaataccgtttacgttaatgttgacggccaaaagactattaaatcaatgtttaaaaatggttcatcaaccaaagaacatcaacataaagatgatattgacgacaacgaaaaagatgctgtttatgatcaagatgaagtgaaattccttcgcaatttagtatcagaaattcaatctgaaaagaaagagttacataaattactagaccagcaacaaagattggccttacaggacaaacaactgctcgaagaatacaaggcagaaattaaggacttgaaagccttaacgatggcaccgcatgatgatggtgaaaaagaagtgacgtcagacaaacaaccggaacctgaaaatagcaccccggagtcacaacctaaacctaaaaagtggtggcgttttggtaaatagttacaactaaaaaagaaaagaagactagttaaatagcggaagataaatttgaacaagctgtagctgccaagctaaagggtgagggctgggactgtcccacagattattctggtggtaaacccttgttcagttgagtatcctgacatttctgacaccctaaagaatgttggaaaatgttggaaaatgttggaaagttaatagattggctcaattttgagcagatgacaccagtttttttggactttctccgaaattggagaaaagcatttgtatcaaatgttttgagtagcatggaattttccgttgtatctttaggggctctaaaatctctaaatgaggttgcacaatttttcgcagactatttgaatcaaccattttgagtagggccgaattttcggccgagttaatactagatgcccccatttttggggagatgggaggtcttaacctggggtaccgaaatggtagtttagaacctgtgccctgaatcagggcggtggtgtatgtgatggattttctatacccgacaacttggcggatatgaaacaagctactataacgtatcgtcctgttaggctaaaaagggatgtccaaaattggacagacctatttaataaatacagttgcaatttatgacataaaaaactggtagttgctatggcctatgtttaatctaggtcgttgaatgatctaatttaatgacttagcatgagcactagcccaaattaaaagacggccattaatatgaccgtctgttgtaagttatgtatatgccccgtgcgtttatttttgttgaatgtctatttgaatgtctttttttcaataatagtgatttataatcatatttagagaaacaaaaaagccgttataacaatgcctaagcattcccataacgacttatcaatggctatctatgcgccacccgggagtcgaacccggatctcaagaaccggaatcttgggtgctatccattacactagcggcgcaacctaatatatgtactcaacagtacaatatattattttagcggatttctagaaaaatttcaagcccaaattttaataaatcgcgataaatcaacgttttaaaattattcggagagaaaacgtattcattaagcgcaaagcattgcatgtattttactcacttgatataatggtcttgttcaaaggataagttactagttttagtaagttgccttttattttttgccagacatgggtcgattgatgacacagatggacatttaatgtcccaccggaaagtaggcgagatcaatgcgcgatgagttatctgcaatagaagcggttgcgcctgattttgtcggtgtcgttaagaaacgttaccaagtcctacagcatattgattggcttgcaccagttgggcgacgcacacttgctgagcagctcaaattaagtgaaagagtcattcggacggagacggattttttaaaggcacaaggtttgcttaattcgtcaaaatcaggtatggttttaactgtcaaaggacaagaagttcttgatcagttgaaacaagtaatggaccaattcttaggattacggcagaccgaacgagagttgagtcgctatcttggaattgagcattgcttaattgtatctggcaatagtgatgaacaaccaaaagtcctcaccgaaatgggcaaattagtcaatagtacgttacagctattattaccacaaggccaaagtgttgtggcggtaatgggtggcacgacgatggctaaggcagctcatgaactgtcaactgatctttctaaaaagcgcaatttaatctttgtgccggctagaggtgggattggtgagagtgttgatattcaggcgaatgcggtttgtgccgagatggccagccaaactggtggtaaacatcgggcattatacgttcctgaacaggtgagtgagaagacttatgccccactattagaagaaccaagtgttcaagaagtgttaaagctgattgaacgcagtcgcggcgtgttgcatagtattggcgaagccattacgatggcagaacggcgggatatgccgattgaaaccatcaaaatgctgaaagaaaagcatgcggtgggtgaggccttcggttacttctttaacgcgcaaggcgaagtggtgtacaagattccgcgaattggattacagattcgtgacttattaaatattccgtgtgtactcgcggttgcaggtgggacttctaaggcccaagcaattgaagcgtacatgcacctcgcacctcaacagacgtggttaatcacggatgagggtgccgcaaactcgattttacaaggggcaaccctttaaaataaaaattttcatttcctaaaggaggaaattctattatgactacaaaagtagggattaatggtttcggacgtattggtcggttagctttacgtcgtatttacgcaacaagcagtgacgttttggaagttgttgctatcaatgatttaacatcaccagacatgttagcacacttattaaagtatgatacagctcatggtcaattcgatcacgaagtatcagctacagaaaacagcatcgttatcgatggcaagaacattccagtttatgctgaatcagatgcacgtaatattccttgggttaagaatgatggcgttgacttagtacttgaaagtactggtttctacacatcagaagaaaaagcacaagctcatcttgatgccggtgctaaaaaagttcttatctcagctcctgctggtgctgttaagacagttgtttacggtgttaatgatgacactatcacagctgatgacaacatcatctcagctgcttcatgtactacaaactgtttagcacctttagctaaagcagttaacgacgctttcggtatcaaagctggtacaatgacaacaatccatgcttacacagctacacaaaaattacaagatggtcctgatcgtggtggaaacgtacgtgctgcacgtgctgctgctgctaacatcatccctcattcaactggtgctgctaaagctcttggcttagttgttcctgcattgaagggtaaacttgacggccacgcacaacgtgtcccagttatcactggttcattgacagaattagttgcaactcttgacaaagaagttacagctgacgaaatcaacgctgctgttaagaaagttactgaaggtaacgaatcatttggttacaatgctgaccaaatcgtttcatcagatatcatcggtacagaattcggttcagtattcgatcctactcaaacacaaatcgttggcggtggcgcaggccaagttgtcaaagttgttgcttggtatgacaacgaatcaggctttacagctcaaatgatccgtacattagaaaaatttgctagcttaatctaatttcacttttgtgactttagaaatgcaatagcattttataaggcgggaggaggtaaactccttccgtctttttttatgaaaatctaggaggtttgtccacatggcaaaacaaacagttgcagatttaaaagatattaaaggcaaaaaagtcttagtacgtgttgactttaatgtaccaatcaaaggcggcgttatcggtgacgataaccgtatcgtagctgctttaccaacaatccaatacatcatcgacaatggtggcaaggctatcttactttctcacttgggccgtatcaagagtgacgaagacaagaaagaattgacattgaaaccagttgctgcacgtcttggcgaattattaaacaaagacgttgctttcgttgcttcaaacgaaggtcaagaattagaagatgcaatcaatgcaatgactgatggtcaagtattggttatggaaaacactcgtttccaagacatcgacaacgactttggcaaacgcgaaagtaaaaacgatcctaagttgggcgaatactgggcatcattaggcgacatgttcgtcaacgacgcttttggtacagctcaccgtgctcacgcatcaaacgttgggattgcaaccgctatgaaagctaataacaaacctgcagttgctggttacttattagaaaaagaaatcaaattcttgggcgaagcagttgacgcaccagaacgtccatttgttgctatcttaggtggcgcaaaggtttctgacaagatcggtgttatcgaacatttattagctaaagctgacaaagttattgttggtggtggtatgacttatactttctacgctgctaaaggtttatcaattggtaactcattagttgaagaagataagatcgaattagctaaagaattaatcgaaaaagctggcgacaaattagtattgcctgttgataacgttgttgcagacgcattctcaaacgatgctaagacagaaactgttgaaggtaacattcctgatggctacatggcattagatatcggacctaaagcaatcgctgacttcgaaaatgttcttaaagatgctaagactgttgtttggaacggccctatgggtgtgttcgaaatggacaactttgctaaaggtacattggcaattggcgaattcttaggtaacttatcaggcgctacaacaatcgtcggtggtggcgattcaacagccgcagttaagaaattaggcgttggcgacaagttaacacatatttctactggtggtggcgcatcacttgaatacctagaaggtaagacgttacctggtatcgctgctatttcagacaaataattttaaattaagaggagattttctcatgcgtaaaccaatcattgctggtaactggaaaatgaacatgaacccaactcaaacaactgagttcgttaatgctatcaaagccaacttacctaagtttgatcaaacagaatcagttatcggtgcacctgctgttgacttacctgctttattagaagcagctaaaggcacagacttaaaagttgctgctgaaaactgttacttcgaagaagctggtgcattcactggcgaaacttcaccaaaaactttgaatgaaatgggtgttgattacgtcatcatcggtcattcagaacgtcgtgattacttccacgaaactgatgaagatatcaacaaaaaagcacacgcaatcttcaaaaacaacatgacacctatcttctgttgtggtgaatcattagaaactcgtgaagctggcaaagctgaagaatgggtttcaaaccaagtaacagaaggtcttaaaggcctttcagctgaccaagttagctcaatggttattgcttacgaaccaatctgggcaatcggtactggtaaaactgcttctgctgaccaagcacaagaaatctgtgctgttgttcgtcaaacagttgctaagttatacgaccaaacagttgctgacaaagttcgtatccaatatggtggttcagttaaacctgcaaacgttaaagaaatcatgggcaaagaagacatcgatggtggtttagttggtggcgcaagcatggaacctgcttcattcttagatcttgttcactttaacgactaatttttcgctcgtatgtatttacgaatcactaaaaattagctaaaataagatgtgggctttgcctgacatccaaaaaagtgctgatgaatatcatcagccaaaaaaggagaaaattacatgtcaattattactgatattttaggccgcgaagtcttagactcacgtggtaatcctactgtcgaagttgaagtttatactgaagatggcggctttggtcgcgcaatcgttccttcaggtgcttcaactggtgaacatgaagctgttgaattacgtgacggcgacaaatcacgttttggtggcaagggtgtattaaaggctgttgaaaacgtaaatggccctcttgctaaagaaatcgtaggtttcgacacaactgaccaacgcggtatcgatgctgcaatgatcaagttagacggtactgaaaacaaaggtaaattaggcgctaacgcaatcttaggcgtttcattggctgctgcacgtgctgctgctgacgaattaggcttaccattgtacgaatacttaggcggccctaacgctcacgtattaccaacaccaatgatgaacgttatcaatggtggtgctcactcagataacaaagttgatttccaagaattcatgatcatgcctgttggtgctaaatctgtacgcgaagctatccgtatgggttcagaaactttccaagcattgaagagtcttttatcagctgacggtaaagttacttctgttggtgatgaaggtggtttcgcacctgacttcgcaaacaacgaagaacctttacaatacttgatcaaagctatcgaaaaagctggttacaaagctggcgaagatatctcaatcgctatcgatgttgcttcatcagaattatggaacaacgaagataagacatacaaattacgttggtcaactggtgaagaattcacaacacctgaattctttaaataccttgaaggcttagttgctaaatacccaatcatttcaatcgaagatcctatcgatgaaaacaactgggaagactgggcatcaatcactaaagaacttggcgaaaaagttcaacttgttggtgatgacttcttcgtaacaaacactgattacctacgtaaaggtatcaagatgggcgctgctaactcaattcttgttaaagttaaccaaatcggtacattaacagaatcattagaagcaatcgaaatggctaaagaagctggctacacagctgttgtttcacatcgttcaggtgaaactgaagatacaacaatcgctgacttagttgttgctacaaacgctggccaaatcaagacaggttcaatgagccgtactgatcgtttagctaagtacaaccaattaatgcgtattgaagaacaattaggtgatacagcttcatacaaaggtatcaactcattctacaatatcaaaaaataataggtgcgttcgagccgtttaggctttgaggattaacctaaaaacaggcgttacggtggttttcaccgtgacgcctgttttgtagttaaccggaaaaggctggttcgaaaagcccgttataaatatggcgaaaaaagcatgttaagaaagggcatctcattactgagatgccctttttttatactatcgttgtaaccgttttaaatcaatgtcataatagaattatcaaacataagtgaggagtaatttaatgcatattgaacatgtcggtttatgggttcacgatttagaagcaatgaaggctttttatcaaacgatgtttcaagcgactgcgggtgagttgtatgagaatcacaaaaaaggattccaatcatactttttaacttttgcagatggtgtgcgtttagaaattatgcaccaagatagtgaactagccggcttagcaactaggggccaatttgcgcacttagcgatggctgttggcagtgaaactgcggttgatcaaattagtgactaagtttcaagcacaaggcttaccattgctaaatggcccacgagtaacaggtgatggttattacgaggcagtcgttcaagatccagaacagaatttaattgaattaacggtttaaaccgacaaaaaaagagttactttaagcgtaactctttttttgtttggttaagattttaagcgatcaatttcgtctttgagcgcctgattttctttttgtttctttcggtaacgccagtagacgtaagccagaatcagtagaataagtgttaaacctgccaagatgtaaggccagtagtctgtctcaggcgtcaagctgacatcttgttggttccacttagccgctgcttggcggctgattgtaaagtgacgtgtgaagtgccaggtacgaccttctgaacggactgttaaatcaagcgtgtaacggcctggtttaaaccgatcattaagcggtagatagaactgcataaccgagtttggtgcaaattggacttgctttttctcagtttgataaagcttcgtcttttggttacgcttggtgacaaaggcgtttaatgaggtttgattctggaacttaggttgtacattacgaatattggcaatgatttggttggtccccatatgttgaccagttttgacagcaccgagtttgaattctggtgtgacactttggtcattgctgcgggcaactactgcaactgcatacgcaaacttattacgcacgctaatctgctgtgttgtttttgctgttgttgggacttcagtcgcgctaatcccaccaactaattggcctttaaaagctttatcaggtgcgcttaagcgaatattgacgactttttgttcatgagcggttaacgtaatgttctttttggccggttttaaatgtttgcccaacggatatttgagtgttttatccgattgattcacgttatcgctataattgacgacgccgttaacattggtagtcgccgtgttagtttgcacacgaaccttaattggtttgtccttatgattaactaatttaatctggagatcttgttgttgcttgggttggacaactaaatcaaaataacttaattgtttgtcggcctgattgtcaggcggaataattgtcatcgcaaaatctgctacgggttgcgcggcttgagtggcttgcgcgtgggcgaagagggcaattaggccaaataataggccgataactagtcttttaattgttgtccgcatattcaaaaactcctttgttagctatttgggctagcgattaaagtccatgtgatatctgattggtaatgtgctttgtcagttggattaacagtttttggtacgtggaggaagatagcatcactatctgttcctgatgttggtgccgtgcctagggttgctgcaacgctcccgaaggatgtcgcgccacctttcataaaggtacttgcttggtcgttaacttgaaccgtttgatcgctagtcgttggtaaggcagcatcgcccttgttagcaccatcaattgtgacgtttggtgttttaaaccaaatgttaacgccagttaagacatcggaagcatctgcgtcacttgcgtcagtagtgccagcgttagcgaaatctgtttgggccacttgtaggtcccaaccgtctaatttagcttggctacgatcatcttgaattgaaacaacattactagtggcaagcgtgtttgctgtgccaatgtgagagccactttccaccgctgctaaatctttgtcagccgaacgatcgatttcatgggagccaaaatgaaagtctggaacagcggtaatcactaatggattacttttttcagtgaagacaaccgctgcatcagtcgtttgtttttcaacttccgtaggagctgcttggatttggcctgctgacagaagagttgttgttgcgagtagtgagaataaagttgtgctaatcattgtttttttcatagtaggtcgcctctttcttaatgagtagaatagtggttaataataggagcaatccgctaagttgataatagcgtatatcggtaatactggtttgtggtaaccgttgtgttaatggtggtgcatattcgagtggtgtcatgtgccattcgttgtgaatggtgcccgcattgtcgggtgcggcaatcaaaggtggtcgtggtagggggacgaccggtagcgtttgctgattgctaaattgaattgttgcactcgaactagcgggcacagcctctgctcgaatcggtgtgaataatagactaccacctaacagaaaagtgaaaaaatagcgtttatacatcgcctctaacctcctaacgatttaattgggggcagtgatgagcattaattctaattcagccgtatacggggttgcggtttgtttaggaccagctggaaattgggtttgaacagtttcgtggagtaaatccgtcaaatccgtttcgtcagcaccgggttgaatcggtgcatgagcggccttggaatagagttgttgcggttgcccggcaaccaatggtttagtggtctgattcttacgccaaattagggcattatcgagtgtggcttgaccagcggtaaaaggttgcttgagattgatctgaatagcccagtctccccgggtagtggcgcgtggatcagagacaatcagactggtatctgctgtcttagtataggggtagagaggactttgactattggtaagcgggagactgccaaaatcgaggtgagtcggtgctgctagaaagcctagcttaccagcaggaatatcctttagaaccttccggacaggcgttgtgagcgcgtatggtgctgggtagttagcttcaacaacgatctgattgggttgcgttggtaaatcagattcaaattgatagtcgaaagcctggttggcagccgctgctttagcagggccttttaataatgattgtcccgcggcgcttagaaagttcagcgtgagctcactggcaggagtcgcggtcccatttaaagcaaatttaaatttctgggcatcatcggtagggagtccaccagtgttgataagggtgatgatttcaggtggtagtggatcgtgcaaatgaagttgcacaatattttgagtagaagtgagactttcaaatttcgttttaaaagtcgtgtcagaactgttcgttgcgttagtggtgccaatggtgctatcgaagtgaacgaatggataagttgttttggtttggtccttttcagttaaactgacaccgcgataaatggtgtgtggtgattgaccagttgtattttcaaggttaagtttaatattttctaataatcgggttgccgcaactgcattgttgttgatagtgacatcagaatcaccaattgtaaccggactgttgctaccactgaggccaaataagacagattggttagtagttgtttgattattaatagtgacttgactgtcatcgccaattttcatgtaagaaccggtactcgctagtggaatgagcccgttggcaatattttgcgcactgttgatggtgaggtcaataatactgttgtcacggaagtcatgcataagcggtcgcgcacctgaaacagctaaatattgaccaaaagtggctgatagttgaccaccaatatccaatttaagaccattggcttggatgttacggataaacgcatctttggcggttaaggtcatcttagaagtggtgtcggttgtcatttgcatgattggattaccacttgaggggttatagatataggcaaaaatatctttaccagcgttcaagttaacttcgctattgttagtggcacttattggactatcttgaacatatgcaccgaagacgtctgaattagaagcgagttttatcgtactattcttgtacgctgtaatggggcttttttgtagataagaggtaaagagtttagtggttgattgaatatcgatcgtactgtcctgggttgcggacattggtgattgactttgtacgtaataataaagactgcctgccaatttcaaattgacatgaccattattagtggcagcaattgtgcggttagtcgtaccagtttgatagaagttgttggcctttgtgacattgatagtaccaccatctgaagcaactgctttggagctacttgatccagtgacaccgaagatatgaccaccagcattgagtgctaaattggaaccagacccttttgattcgatattaatctgaggaataccagcgcctgatgccgggaaaatagcgttgttggctgtaattgaaacttttgcaccaccggaaacttgaataccgggggcaataccatcagctgggttttgatcaattcggattaggccataagagccgccaccggcatgattgatagtcgttgtcccacctctaaagtctaaccggcctgtttcagccaattcctgtgaccaagtaccagcagtttgggtaatggtattgttaccactaaaggcgatcacttcctgcatgaaatgaagtgactgcgcactactgttgtatccaacattttcgagcaagagcgtactaccatttgcgtaagactcatttgttgggtgacagagaccatagtagttattattattaattcttagatttgtaaatttgattgttttcttttgcataccagttgagccgatgtacagttgtgttgttggtgctaggacagcaatatcagcaatatttaataaatggcgctgtccggtcgttggattggtgccatcgatggtaatgtcttgagggttatttttaccgatttgaattctagcaagcaagctttcgagcacattcaatgtgatatcagctgttagttggacgctttcgccattttctaaagccgcttttaattcggctgcattcgcaacgggcgtgagaccggctttgacaccaggattttgtgtcacaagtggtttgattggttcaactggctcttgcggcggtgttttaatcggttctgattcagattttgctgattcttcagttgttgagacggatgacgattcagcggattgtatattgcttggatcgtctggttcaacgaggactgaagattgggattcacttggtggggctgatgctgatttctcagcacgactaacatgaataggagatagtagtgcagtcgatagacttaataataagagatacgaaacgggggtcttcatcagcatagcctccttggttgatcttatatcttataataatcataaataattgaaattaataagtcgataaatgtgattcggtgagcaaaaatgattgacgcccgatatcagatttgaaaatgatagcgctgtttgttagccgccaaaactggtataatagggataatcagattcatcggaggagtgatcatgatgaaaaaggtagatcgacagacacgtattgaacagattattaatcaacaagtgataacaacccaagaagaattattagcaacattaagagatgatggtattgacgctacgcaagcgacaatttcacgtgatattcgtgaaatgcaaattgttaaggcccgggatgtgaacggggaattgcggtacacggtttttcatgacgatgaacggacgcaagaacaacggttaaacgataagttacgtgaagtcgccttgacgattacgcaggttcaggtgatgaacgtgattaaaaccgtgcctagtaacggtaatctactagcagcgttaatcgacgacttagggtatgaggatgttgttgggacgcttgctgggcatgatacaattgtggttatcagtcctgatgaagcacatgcggcagatttaaatcaacgtttttcagcacatttagcggtaactaaccgaaattaacgactaaaaattaattaaagggcgccaataagttaggtattaagaactaacttattggcgcccttttttcaggagattaggtattcgcaaaagcttatctgattgatttgaccactattgaacaaacgattcgcaatcgatagtctaaaagctgatttttagcagaataagcgcttggttgtaagccttatcaattgacacttgttgtttatcttcttaacatgaataatataaataaatttatgcaatgacatttattaggaggttactgatggcacattatctagaatttgaccatgtttcaaagatttatcgcggtggtaataaggccgttgatgacattagcttcacagttgatcaaggtgaattcatttgcctaattggcacgtctggttccggcaaaacaacgacaatgcgcatgattaaccggatgattaatcccactcacggcacaattacactggctggtaaatcgttagcggacacggaccccgttaaactacggcgcaaaattggctacgtcattcaaaatatcggattaatgccccatatgacgattcgtgacaatattacaatcgtgcctaaactattaaaatggtccgatgaagaccgtgaaaaaaaggcacaggaattattaaaactggtagaattacctgctgattttttagatcgttacccaagtcaattatcaggtggtcaacaacagcgaatcggtgttatccgagcgttggctgctgggcaggatattattttaatggacgaaccatttggcgcacttgatccgattacacgagaagcactccaagatcttgttaaacaactccaagttgaaatggggaaaacagtgatttttgtaacccatgatatggacgaagcactcaaattatcatcacgaattgcgattatggatggtggcaaaatcattcaatatggcacgcctaatgaaattttacgacaaccagccaacgattttgttaaggacttaataggtcacgatcggttattggaagctaaaccaaatgtcgaaactgttggacaaattatgctgaagacaccggtcacgattacgccagatcaatcactgagttctgcgattaaattaatgcggcaacgacgggttgatacgttgttagtcgttgacgaccaacagctgcttcaagggttagtggatttggaaaatattgaccatcattacaaagatgctggtaccgttcaagatatcatgtcgacgaaggtcaactttgtgaatcaaaccgatctggtccgcgatacaatcgaacggatattgaagcgtggttggaagtacgtgcccgttgtcgatgatgaccatcgcttagtggggattgttacgcggacagcgcttgtcgatgtcgtttacgacgccgtttggggcgatgacgagccagacaatgcaacagactaaaggaggccagagcaatgcttaattttttaaatcaaaatggggccgacttgctaattaaaacgtgggagcaactttacatctcggccatcgcgttattgttaggggcattagttgcagtaccgctcgggattgccttaacgcgtgttccgaagacggctaaagtcgtgattgcgatagctagcatgctccagacggtgccgtctttggcgctgttagcgttaatgattccgttactcgggattgggaaagtaccagcgattgtggccttgtttatctattcgttattaccgattttacgcaatacctatattggcatgaacgatgtcgatccggtgttaaaagatagtgctaaaggtatggggatgacgccgctccaatcaatcatgcaggtggaagttccgatggcaatgccagttatcatgtccggcatccggttatcggcggtttacgtcatcgcttgggcaacactagcgtcatatattggtgccggtggccttggcgatttcatcttcaatggcttaaacctatttaagccagacttaatcatcggcgggacaattccagtgacgattttagccttgttggttgatttcttacttggtcgtcttgaaaaaagaatgacacccgttgccattcgctaaaggaggtcgctatgttgaaaagattaaagaaaatcacagtcttaacactgcttggtggctgccttttgctattaggcagttgcgggttgcccggtcttggtggctcggcgaaggatacgattcggattagttctcaaagtacgacggaatcccaaattttagccaatatcgtcagtcaattgattgcgcatgaaacggataacaaggtcgaattggttaataacctgggttcttcaacggtgacgcacgaatcgttaatccgcggcgatgcggatattgcaacgagtcggtatgcaggaaccgagatcacggggacgttaaaaatgaagccaacgaaggatcccaaaaaggcgcaaacaattgtgaagcgcgaatttaaagaccgctaccaacaaacgtggtttccaacgtatggctttgccgatacgtacgccttcatggtgacgcagcaaatggctaaaaagtaccatcttgaaacggtcagcgatttgggccgggtggctaagcaattaaccgctggcgttgactcggtgtgggtcaaccatgaaggggatggctaccaagaattcaagcaaacttacggctacgattttaagaaggtagcgccaatgcaaattggcttagtctatagcgcacttgcggccggtaaaatggacgtcgtcttagggtattcgactgatgggcggattaagagctacaacctgaaggtcttaaaggatgaccggcactttctcccaccatacgatgccagtctagtggctaccgatcagattttaaaacaacatccagaactgaaaccactcttaaaccggttatccgggcaaatcaatcttgatacgatgcaaacactcaactacaaagtggataacgacttgctagaacccgctgtggtggctaagcaattcttgacgcaacatgattactttaagaaaggagccaacaaatgacgcatttaaacacgtggcaacagctactttattatttccaacataatggtggttacgttttaagccaatttaaccggcacttcttaatttcaatctatggggtgttactagcggccatcattggaattccgattggcattttgattgcgcatcgtaaaaaaatgagcgatgtggtaatcggtattgccaacgttattcaaacggtgccgtcgttagcgatgttatcgatcatcatgttagggttaggcttaggcactaatacggtgattatgacggtctttttatactcgttattaccaattatcaaaaatacgtataccgggatgattaatgtctcaccaaatattctggattccggtctggggatggggatgaccaagtggcaattattgacgatggttgaattacccctgtccttagccgtgattatggcggggattcgcaatgcccttgtagttgctattgggatcaccgcgattggctcatttgtcggcgccggtggtttgggtgatattatcattcgagggacgaacgcgaccgatggcggtgcgctgattttagctggggccttgccaacagctttgatggcaattatcgccgatctcgttttagggttcatccaacgccgtttagaagcaccacaagcgcatcattaaaagcgctaaaaaaggggccaagacaaaagtgaattttgtcttggcgccttttttagatatccgaattctaatccttaggagatacccaactgatggcacactttcttttatttggttatgaaagataaggttcaaatgcatcaggaactggggctgtaacggttcggggttgatccgtgtaaggttctgtataccgcaacgtctgaccgtgtagtaagagccgcggtgttgtatcggttgggttatagagtggatcacctagaattggatgaccaatactagccaagtggacgcgaatttggtgagttcggccagtttcaaggtcgaccgctaatactgcagttgcgcccttccgacttaaaacgcggtagtgggtaatcgccgataaaccgttgatgtaatcaacacaacgttgacgatcattttccgggtcgataccaatgggtgaattaattgtggcgtgttctgccaattcgtgttcgggatcattgacgatagcaatgtactggcgggccatctttttttgactgagttgacggtttaaaattccgatcacaatcggcgttttgccaatcaataagacgccgctagtggcttcgtcaatgcggtggaccatgtaggcctttttgccttgttgggcgagataaaaggcgacttggttcattaatgtcccgttttcgccagggcggttgggatgggttttaataccagcaggcttgttgacgatcaataaatcgtcgctttcaaataaaacactgaatgattgtgtcgcatctagttcgtagttttgaactttgacggacacttctgaaaaattcagcgtgatttcatcgccaggttctacgttgcggttaaacgcgcggtattgtccgttgacgagtatttcacgattaatccgcaagaagtgttgcattttttgcggcactaaccagtgattgagaagtccgcggactgacatcggactaaagtctgtttctaaagttacttttttttggtaaattatcatcagagtaaaccaccttcaagctaccagtttagcgaatttagctctaaaagtaaattttaaaagattattaatgtcaacgcactggcataaggggcgtactggaatatgctacaatataacaaagtacgatgtaaattgattaaaagagggattgtatgaataagcaggattcgccgatttggttggcgattaaacgtttttttaaacgggcgtggcgagtcgtgaagtatgtttggtatcgactgcaattaacgcgatggttgattttgggcatattacttttagtatttttcatgagtagctacttaacctttaaagcaaaaacggctaacgttggggaaattaaggccaacttacaaacatcaacaacactttatgataaaaaagatgcgcgggcgggtaccttatacacccaaaaagggacatacgttgaattagataaaatttcacctgagattcaaaatgcggtgatttcgacggaagatcgctccttctatacgaatccgggctttagcgtcaagggattggcccgcgccgctgttaacttagtgattcatcatggccagattaccggtggggggagtacgttgacccagcagctcgccaaaaatgcgaagttgagtcagaagcagactttctcacggaagtttgaagaacttttcctagcggttcaaattacgaagacttactctaaaaaagatattttggcgatgtatttaaataatgcctacttcggtaacggggtgtggggtgtccaagatgcttctagacggtacttcggtaaaaatgctagcgaattagatgctagtgaagcggctgtgattgctgctatgctccgaagcccaagttactataatccggctgatcatttggataacgccacatcacggcggaatttaattctcggtctgatggttgataatggtaaattgaatgagagtcaagccaaggcagccaagagtgaaacattggtcgttaaaaataccttagaacaaaacgatagttacaaatacccttactactttgatgaagttgtgaatgaagctgttaagcggtttggtctcaaggaagaagatcttgttaaaaacggctataagatttataccgcactcgatcaatcacaacaaagcaagatggaaaataccttcgagcaaaattggttgttcccagacaatgcggctgatggcaccttagtgcaaggcagctccattgccattgatccgaaaacaggtggtgtgtcggccgttgttggtgggcgcggcgattacacgattcgcggttatagtcgaatcactcagatgaaacgacaaccgggctcgacgattaaaccgttggcggtttatacaccagcgttagaagatggctatcactacgattcttctcttcaagataagaagaagagttacggaactaataaatatacgccaaccaacccagacaatgtttataccggttcaatgccgatgtatcaagcggtcgccaatagtacgaatgcacctgctgtttggttgttaaatcaaatcgggcttaaacgcgggattaagtcggtggaagatttcggcatttcagtgcctaagagtgaccaaaatctagcgatggcccttggtggttggcaaggcggggtttcaccttatcaaatggcgagtgcttatacagcttttgctaataacggggaactttccgagacccactttattcgaaagattgtggatgccagtggtgccgttattgttgataacacgacaccatcgaaatcccggattatgagtcagaaaaccgctaaggaaatgaccagcatgatgttgggcgtttataatagcgggactgggcgttacgctaaaccagatggctatcaagtcgctggtaaatccggtagtaccgaagtccccgacagttacggttacgggacgaaggatcaatggttaatcggttatacgccggatattgtggtcgcgacttggatgggctacgataagacggatcaagaacactttatgaaaaataccagtatcgacggcctagcgccaatctttaaatacgaaatgcaacagttgttaccaacgacggcccaaactagctttgatacggaagatgcgcaatcaatggctaaaaaagaagacgatcaggattctgataaagtcgtcaattcgctgcaatcgggaattaaagatggtgtaaataaagcgaaagaaacggtcaatcaatggtataataacttgaaaggtttttttaactaaattcatgtaagggagtcactactatgacagtcaacatttatgatgatgcgaaccaaatggcaactaatttacaaacattaccacaatttttaggcttgcaaaatgcttttgcagcacttaagaaggatgatattgccttcacaatgttcaagaaatttcaaacacaacaaatgactttacaacaaaaacaaatgcaaggcgaagaattaacggatgacgaaatcaaagaaatccaagaacttgctcaaaaaatcggtgatatcgatgccatcaagaacttgatggaacaagaacgccaattaagccaattgatggatgaattaaaccaaatcatctcaaaaccaattgctgatatctaccaaggctaaaccgtattttttaagagaagtatcgagtcgcaaatcgcgaactcgatgcttctttttttagtgggaaggcgcctttctaagccttagttgcaatgctataataagacatattactaaaatgggggataacgatcatgaaatttattcacgcggctgatgcgcatattgatagtccgtttgtgggactaaaaaaagcgtcaaccaatttatggacgacgattcacgaatcaacttttaccgcctttgaaaaattagtgcagactgccattgatgaagctgttgattttgttttattagtgggtgattcatttgatcaagaggcccagagtttgcaggtccaaaactttttgaaacaacaatttgaacgcttaaacgctgttgaaatcccagtttatctcagttacgggaatcatgattactgggatcccaatcaaattcatttcgattttccgaaaaatgtccatgtttttacaacggctgttgaagctaaaacactaacaactaaagcgcaagaaacggtcacgattgttggttttagttacgggcaacggtggttagcagcggatcaaacgacacaattttcaccacgagctgccacaacttatacaattgggactttgcatggtagccagagtacgacctctgatgcggatcattacgcaccgtttacgttaagtgaactcaaccaactacaatatgattattgggcgctaggacatattcataaacgccaaatcttacaagaacggccttatgtgatttacccgggtaatttacaaggtcggcataagaacgaacctggtgaaaagggtttttatttagtgaccgcgcaagcggggcaattcgagcttgaatttaaaccgacgacggtgattgaatggcaacggcaacgatttgaaatccctgaaaatccaagcttgaatcaattgcaagaagcgttgagtcagcaattagcacagagtgaaacggcgagtttggtggctttggaattgacgcacgctgaacggttatcgagtgatttgattcaacgtgtcaataatggcgaattactcgcttatttacaagcagccctcgagtctagtgctgtcatgcattggccatacgcgcttaaactacagtttgcggcccaacaacaatttagccagattgatcaggcctattggcaatcggcggctgataagatctttacgccagattacatcttggaaaaggcccaaccgcttctgaaagaaaaattcatccgagaagcactcgaagaacccgattttcaagatgatttgaagaccgcggccgaaacgattctacaagaaaagaagctggaggactaagcatgcggattaaaacaattaacatctttggctttggtaagtggcacgatcaaacaattgatttgcaaaccgattaccaggttttatacggtcaaaatgaagctggtaaatcaaccatcacggcttttatcaaaggcgttttgtttggttttgcaactggtaagcaaaagtatgaacaatacctccctaaaagtggcgcgcagtatggtggcgagttaatcgttgaccaccacgatcgcgagattacgattcggcgggttgctggtaaagccggtggcgaggtaaccattattgatcagggcaaggagtttggtgcggattatttgaaccaattgattgcgcctgcagacaaagccctctttacgcaaatttttgagaccaatcaacaggatctaaatcagatttttgggctaactgccgatgattttatgcaacatcttttaacgattggtgcggttggtagtcatgaatggctcgcttttgaagctagcttagataaggctagtcagcaaatctataaaccatccgggcgcaagtggccacttaataaggccttaaagcagtatccggaaatcgaacaggctgttagccaggctaaagcggctaatcagcaatacgaaagtaacgaccaacaattacaacaggcactgcagacgctgaagcaagatcaggcagcactagctgaagttcagggacaaaaaaaccagcagcaacaattactagaacgctggccgaagtatgtagaatggcaggctttacaagcatccttagcgacaacgaagccttttgacagcactttgtatgcgcaatatcaaaaaatcgaagaacaacgccaagaatctcaagcagcattagcggatgctcagcaagctgtggcgacgattcaagaaacgcttgatcaaacgggtgaattccgattctatcaaacacaccaagctgaaattgatgggttactggagcaatggtcaacacggcaaaagcaagcgcaacagttagccttgcaacaaacccagttgacgcagttgacgagcgaacaagcggcattagctgctaagtatcaatggccgacgactgaaacattaccaactgttttaagcgccgaccagctagaacagttacaagttgccaataccacctacgaacaaacgcaaacgaccaaccgcgttttaacggatcaattaacaacattgactgatcaggtggctgaacaagaacaattagtgaccactttagaaacacccgcggaagttgctagtccaacaccgatgagcaatatttgtttaggattaggggttgttggtttattaggcatctttttaccggggggcttgaaagcaattgctttgttaggactcgggttacttggttatgggttatataccaagtatcaagggcaacaaaaacaaacggctgatacaacccaaaaggcgcagtggcaacaagcactcgctaaactcgatcagttacaagccgaccttcaggaaaaacaaacagcacttgcagatgggcaacaagctttaagtaccagtcaacaacaagtcgctacgcttttaagcacgaatggttattcgaacgaagcaacggtgacacaagtcatgaaccaacaagatgccttggcgcggatgcaacacttacaagcattaattgcccaacaaagtgctgaaattaacgcgagtcaagctgacttaactgattattttgaacagtttgcgtttgcgcacgattggctaggggcgcttcaaggcgaaccactgcataatttggcgcaaattgaacaatttaagggccggcttgatcaattgaaacaagctctcgcgcaggataatgaacgttatgaatatcaacaacaacaagtgacacgcttgcaaagacaagaccaagaacgacaagtgcaacaagctgacttgcttgaaaaagcccagctcaaaacggccgctgaactagcgcaatgtgcagccgctgaacagcaacgccaagtgcaacaacaacgtcaaacagatcttgaacatgaattgacaagttatttgccacaattacaagcttttgaggaccaagcagccctcgaaacggcaattgcacaattaacgcaacaaacggcgacattaacggcggcaattcaaacacaacaacagacgattgccgagttacaagttgttcaacaaaagttagttgatagcgatgcttatcaacgacaaaagcaagcacaattaaacgctgaagccgacattatcggtttagcacaagattggttggctaaacaattggcaatcgattggattcaagcgaccctaacagcagcttcacaagaacgattcccacgtttattagcaaaagctacgcaatactttgcaattctaacgcagaatcggtatattgaaattactttcgaagcggcaactttaactgtccttcgacaagaccaggttctatttgaagtcggcgaactttcacaaggaacggcagagcaattatacattgcattacgttttgcgtttgcagaagagattgccgatgttgtctcactaccattattggtagatgacgggttcgtcaatttcgatgatcagcggcaagcagcggtttggcaattattgcaaaacctcagcggtgcacatcaagtcatttacttgacggctaatccgcgaactgaggccgcctttggcacggaacactggttaaacttagagaaggtagggttagcaaatgacgactaaaaagctatttgattaccaaaatgatgaaaacttagcgctatttgttttaattaaagcagcggatgtcagagttgctaaaaacggcaagcaatttattgccttcacattccaagatcaatccggacaaattagtggtaagtattgggatgcttctgatgaagatgtggccttatttacaccggggaagattattcatctccaaggtaaacgggaactttatcaaagtaatccacaaattaagatctataaacttcggttagcgactgaagaggaaccacaggtcattgaacaatttatccaaaaagcaccggtacaaacggccgatatggaagaagaaattagccaagtgctttttgaaattaccaatcctaattggcaacgattggtgcgccacttgattcaaaagcatcaagcggacttcttcagttttccagcggccaagactaaccaccacgcttttgcgggcgggctagcctaccatacgttatcgatgttgcgactagctaaaacaattgccgcccaatacccacaaattgatgcggcgttattgtattcaggggtcttgttgcacgatttaggtaagacgcttgaattatcggggccggtttcaacggaatacacagtgcgcgggaatttaatcgggcacattgtgttagttgatgaagaaatcgttaaggcttgtgagacgctaaaaatcgacatcaatagtgaagatatgttagtgctgagacatgttgtcttagctcatcacggtttaatggaatatggttcaccagtgcgaccacaaattttggaagcagaagtactccatcaaatcgatgaaatggatgctagcattacgatgatgactcaatccttgcaacatgcagaagcggggcagtatactgaacggctctttgcaatggatggacgtcatttctaccgacccgttaacgatcaacaattaacgcaggattaattaaaaaaagagcctcaaccaaacagtaatctgtttgattgaggctctttttagatgtgcttattttgatgatgatttagctgatgattttttagcgttaacgccgtagcttgaaaggatatctgataaatctttatccttgattgttacgtcggctttcttaagaaccttcgtgtaaaccttagccatcactgtttgatcattagcccacttagcataaacttggtcagttaatgtcttcttgtgatcagccatcttacctttaccagggttcttgatcatgcggataacgtggtaaccatatgatgtcttaacaggtgttgttgtgtattcgtttgtcttcaacttgaaggcagctgttttgaatgttggatctaatgatgtatctgtgctatcaaagacaggtaatttaccgccgtctttcttagtaccagtatctgttgagtacttcttagctaaagcagtgaagtttttagttgagttgtctttcttaagttcagaaataactgtttcagcagtatctttcttttcaactaagatatgttgtacttcaacttttggttcgtatgttttccattgtttcttcaaatcagcgtttgtaacttttttgttagcttttaaagcagcgttagctaacatttgagttgtgatttggtttttgaatgaagaggttgttaaaccactttgtgcaagtactgaagtgaaagatgaaccgtattgtttcttgtaagtattgtaagtcttgtcgattttcttagtaagactcttgctaccatattgttcttgaagtgctttttgcaagatcatttgttgtacttgttgcttgccggcagaagtttccttaatttctttgtagaattcgtcttgagtgactttaccacccttaagagttgcgatagtgttgcttccacaacctgctaatgtaactaccattaatagactggcagcggctaatagccattttttcatcatatgacacatccttataaattattgtaaatacgattaataccgtgaattcatcaattaatataacacatgaacccgctgaattaaatccgagagcgaaaatttcacagaaccttcaaatttagcttttttatgaatacgtccgtgaaaggttgataaactgcgttatagcgcctttaaatcgtccgtaagacgtttgattgattctgaaatttgtgcaacccggggttgagcttcaaacgaaaaagtttgaacagcatcgctgatatcagcgagtgaatcaacagctgttgttttgatttcgttagacagttgaccggccgtgttttgtaaatctacagcgttactttgaacagtttgtgcttgcatggtaacgtcggttaaataatggctgattgcttgttgacgttctaagcccgtttttttagcggttagtaacgcataggttgtgccaagaaggccaccaatcagtaatccttttgaaaatgacatcgttaagcctccaattgttgcttaatcgcgtcagcaatcgtttgtaacttctctggtgtataatccgctgagttatcagcaaattgcattgagaagccgtctgctgccgtgtaacgagggagtaggtggatatgagaatggaaaacggattggtaagcaacctcaccgttattattacaaatattcatccctttaatcgcgggattgctggccttgattgcattcgcaatcttgggtactcggctgaaaaccgcagcagctaagtcggcgtcatattcgaaaatattggcaacatgttgctttggaatgaccaaggtgtgaccgggtgtggtctgggtgatatcgagaaatgctttgacaacatcatcttcatagacgacagtgctcggaatttcttgacgaacaattttacaaaaaatacaatcatccatataattaaatacctactttctataagattgtggcgctgtatacggttaatgctatcataataacgcgttttctgctactaaatcacggtcaattgagtgaatcgttcgttaaaaatgaaagggtttgttaaaattaataattgatgataaacttcgtgttaagtgtttgtcagaaaagggtatcaactaatttttaatttaaatgaatgaggcaagttaaatgagtttagaaattaaccaattaacgggtggttacgcccacgtaccagtgctccaagaagtaagttttacggttcccaatcaacaggttgtcggcttgattggcttaaacggggctggtaaatcaacgaccattaaacatattatcggattattaatgccgcaaaagggtacgattacgcttaatggcgtcacgttgcaatctaatccggatcaataccgccaaagtatggcttacgtgccggaaacgccagtcctttatcccgagttaacattacgagaacatctggaactagcgatgatggcttacgatttagatttcgagaagacttgggccaaagcgatggtgttattgaagaagttccgactcgacaataagctggactggttcccagttcatttttcaaaagggatgcgtcaaaaagtgatgatcgtcaacgcttttatgactgacgccgatttattcatcattgatgaaccttttacaggtcttgatccactcgccattcacgatttattggacattattgctgataaaaaggcggcgggggcggctattttgatgtcgacccatattttggccacggcgcaacaatacgccgattcttttgtcctattaaatcaaggtaaggttcgaacaactgggacgcttgaagaactgaaagcagaatttaacatggcagatgcaaacttagatgatatctatttgcaaatgacgaaagaaggttaatgatgcgacagttatggcaaaaacgtgttcggcaacatattcaagaacaagttaaatatctcaaactggtttttaacgaccatttcgtcttagctttaattttcctattgggtgcattaggctatacgtatgctaatgccgtcaaagggctggatccacaagcgtggtggcttaaattgctattgagtctcgtcttattagcggcagttagctttgggcgctttgcaacattacttaaagaagcggatagcgttttcttattacctaaggaaagtgatttacctgtttatttaaaagcggcgcggggttacagtgcctggctgccggtaatttttaccgggctagtaacgggattaattgcaccaaccctgctgattactaaatccgtaccgagctggcaattactcctagtttgggccacattaatcgcgatcaaagatcgccgcttttcaaatcaattattgaattggtaccagatagatgccaagttacctaagattgtttggttactagttgattggttgttaattggtagtcaactctttagcggcttggcaatcgctggggttttaatcgcaattggcttggcttattatcaacgacgtcaattgacaactattcaacagacaacattgtttgattggttggcagcggtcagcgcagaagattctagaatggggcgtatttatcgcttatacaacctctttacagatgtaccagggttaaatagccaggtcaaacggcgccgttacttagattggctattgccagttgctaagcgtagtggtaatccatatttgtatctctacacacgtggttttattcgcgggaccgagtttagcggattatacgttcgcctagtggttttaggaggcatcattctatgtttcagccatctgtggtggttgagcttagcactaggtttgttattaatctacttagtcggcttccagttgctaccgttttatactcaatatgaacaaattatttttacccatctatatccgattgctaagcaagctcgcgtgaaagctttccaacaactgttattaggtttattattgtgccaagccatcttgtttagcgtgatactgctagtgacgatgggcttggacctccaagctgggttaagtgttctggcgttattcgccttagttggtgtttttgttcagttctatttaccacaacgattagttaaataatcccgaattcaaaggggtgcctacttgacgtagcacgtgtgcttattatatgatactggtagttaaaaatcagttgaagcaacgcggtgccacggggtaggcaccttattttattgtaaaggagtcgggtggatgaatttcgacttagataccggttggcaagtacgttcagctggtggtgatacgggtgccgcttatttaggcgtccgtgcatcagagaagatatttttaaaacgaaatacgtcgccatttctagcggctctttctgcagaaggcattacaccacgtttaatctggaccaaacggatttcaagcggtgatgtgttaaccgcacaagaatggctaaatggtcgtacgctcaagcgtgatgagatgaatagtccgcaagttgccaagttattggcgcgggttcatcaatctcatctattaaagcgcatgttacaaaaggttgggggtcaggtctggcaagcaccagagatgttgcaaacctacttctatgatttaccgcaagatttgcggcaacatccttttttagcacaaacgagtcagtatttaaaagacacgatgtcagcattacaaacaccttctttagaggtgtgtcacggcgatttaagtcataagaattggttgttatctgatatcaatcgtttgtacctagtcgattgggattcagcaatgttagctgatccagctgtcgatttcggaatgattttatttcaatatgttccacgtcaagaatggcaagagtggcttgaaaactatggtttagaggtaacgcctgaattattgatgcgcgttaactggtacggtagtttgaacctactccaaagcattaagcaccattatcaacgtggtcgttttactgaaatgaaccatgacatattgcgtttagaagaagttctttctgaaataattaaaaaaaattaaatgccaaagagtgtgccaacaggtgttaatattctgaggattagcatagtctggtgaatggccaacttgttggttatttgctagacgtcgctaaacgcaggaatatgcctgctggcacacgtttatcctaatcagattgcggggccgagacaaaatgacttttgtcccagcctcttttaattggcagcaaatgaggagtttattatgcgtttaagaaacaaaccttgggcagcggatttgatcgctgaaaacccagacatgattttggtgagcccagaaaatattgccagtaactggcaaagtcgttttgccaaggaacaaccaatctatatcgaagttggttcaggtaaagggcaattcattactcaaatggctcaaaaatacccagaccgcaacttcatcgcggttgaaattcaagaatcagcgattgccgttattttgcaaaaacaagttgaattaaaactccctaatcttcaattattgttagggaacggcgcagcattgacaactttcttcgccgaaaacgaagtcgcaggggtttacttaaacttctctgatccatggcctaaaacgcgtcatgaaaaacgacgcttaacttataagtcattcttggctgaataccaacaaattatgcaaccaacaggttatttacgtttcaagaccgataaccaaggcttgtttgaatactcattagccagtttaaatgcatatgggatggtttttgacgatatttcacttgatttacacaacagtgatttagcagaagacaatatccaaacagaatacgaagaaaaattcagcaagcgcggtcaagtcatttacagattagaagcgcactacaaatagcgtgttttttaaaataaccgctcaagccaaataaaaacacttaccaatttcggtaagtgtttttatttattttaaagttgtgaaaactcaatgacaacccccgttttagcatcaactttgaagtgaaattgatttgtgccttcatcacgttcgcagatgataccgccttgataaaccgggaaagtccgtttgttttgtgaaaataggtgaggactttcttcaatccatgagccgacgatttgcccttcatgacgaaggcttgctttgacatcttctaaaatcttgtcgagcttaaccatcttttgttgggttttatattgtctggtgccggctgctgccgcaacggctagtccgaaaccagttaagagatattttaacgtttgactattttttttcaaaaaaaaactcctcagtaaatttatctttaaatagtatagcacacttttttgaggaacaagagtggacatttgaccacaaaccgcttatattaaaacgagtagttaaattgaaggggtgcataatgaaagaattcgcaaagatggcagaaacaaatctaacccatctcattaccaaaggaaaacatgtcttattttttacagcaacgtggtgtagcgattgccggtttattaaacccgcaatgcccgaaatcgaagctgaattcccagaatatgaatttatcgaaattgatcgtgatcaatacatcgatatttgtgaagaatgggaaatcttcggtattccaagctttgttgtgattgataatggccgtgaagttggtcgttttgtgaataaggaccggaagacaaaacgtgaaatttcagaatttatccactcattaagttaattttaaaggagtcataaaatgctaattgcaagtatgaaccaaaaatcttttccaaatattctcgttgtgatgacccaaccagatgttgctaatcaagtaacgactgagaaacaatcaattgtcagaattagcgaccaagcagatcagacaattggctataactttttagcaatcgatcaattattacctgaattacaatttaacggggtccaagccctcagtgttgcggatgtcgcaactttaaatcaagcacttgaagctgctggcttcacacctgatttagttgctgatgaaacaccccacatcgtggttggttatgtacaggaatgtgtggttcatccagattcagatcatatgcacgtgacacaaacgcaaattgcacctgatcaaacggttcaaatcgtttgtggggctgctaacattgctcaaggtcaaaaagtgattgtcgcaacagttggcgcagtgatgccagaaggtaaaatcatctggcctggtcaattacgtggcgttcaaagcgacggtatgatttgtgctgctcgtgaaattggcgttgaaggtgcacctgctaaaggcattatggtcttaccagatgattgggaagtcggccaagcagtgacggctgatgcagttgccgcactattaaaataaataagtaacttacgaatttgttatgggcttattaaaaataaaatagtatgatagtaaataacaattaattagttaacaccgtctaattaattgttatttagtttttaaatttttctgaaaataattaattaaaagtctaataagtattgtttagatatcggactatcaaagaggagcttacggtatgtgtgggattgtcggatttgctggtggattgtttgatttaccaaagaaaaaagaagtattgaaccaacaaatggatgtcattaaacatcgtggcccaagtggtgcgggtgatttcattgatgataaagtggcgcttggtttccgtcgcttatcaattattgatttaactaaaggtgatcaacctatttataatgaagatcatactaaattgattttctttaacggtgaagtatataactatcgtgaaattcgtaaggaattggaaccattaggtcacgaattcaagacggattcagatactgaaacaattttgcatgcctatgaacaatggggcaaagatgttttgaagaagattcgtgggatgtttgtgttcgtgatttacgatttacaaacgaaaacgttatttggtgcccgtgatttcttcgggatcaaacccctttattacacaacgcttgatgatggcacctttatgtttagtagtgaaattaaaacattcatgcgtcatccagaatttaagcggacattaaacaagaaagctcttaaatcattcatgatgaatcaatataatgatttacaagaaactttctttgaaggggtcttcagattccctgcaggtcattactttacttacaaagatggccaattagatattgaaaagtattgggatatgcaatttgatccttctaacttatctttcgaagaagaagttaagaaaattgatgcttctgtcgaagaatcaatcaagatgcacaacgttgctgacgtaccagtgggtgcctttctttcagaaggggtcgatagtagttatgtaacaagtatcttgcaaccacaagaagtctttagtgttggttttgacgaccaaacttataacgaagtaacagccgctcatgctttggcagacgaactgggcttgaacttcaatgaaactaaggttaaagcggacgatgcgtttgctgaatttgataaaatccaatattacttggacgaaccagacgggaacccatcatgtgtgccattatggttcttatcacgttttgcccgtgaaaaagtgaccgttgcactttcaggtgaaggtgctgatgaattgtttgccggctacgttaactacggaatgcattcacacaatacaacaatcaaggctttcacatctagtttgaagaaattaccaaagggtgcccgtgctaaattggcgaagacagtcaaaaagatgccagcattccctggtcgtgttcatttatatacgaacttggctaaccctaaggaattctatgccggtcaatcagtaatttatgatatcgaaaacccaagtatttttggttcagatgaagccaaccaatacttgaaacccgcttatcaaaatgacacaacaattcaagaaaattatcaagcagactttgaccgcgtcaaagatgctgatcccgtttcacaaatgcaatacattgatatgcatcactttatgttaaatgatattttacaaaaagctgataaactatcaatggcgcacagtttggaactccgggtaccatttttagacccagaagttgctaaaactgctggtcaagtgccgactgaatacttgattaacagcaaggatactaagtatgcttaccgtcaagcatctgctaagcatttaccagccgcttgggccaacagacctaaattaggtttcccagtgccaatcaagcaatggttagaaactgacaagtactatgaacaagtcaaagcgctctttagcgaagatttcgtcagtgaattcttcgatcaaggccaattattagcgttactcgatgctaataaggaacaacgcattaacgggcgtcgtaagatttggacaatttacacgttcttaacgtggtacaaggtttacttcatcaacatcgaagattatttagtattaggttaattcaaaagaggttagggcaaaaatattttgccttaacctctttttttgataaaatagcgttttttaaggattcattatttagctcaaacgcctgatatggtaaacttaaagggatttgattcaaatatacttagtgactttctgaaaagaggacatttaaaatgataacaagtgaaacggtttaccactttgtgggcattaaaggatcagggatgagtgctttagcgctcgtattaaatgatttaggctatcaagtacaaggctcagatatcgaccaatatacctttacacaacgggatttagagaaagcagacattaagattttacctttctcagccgataaccttcacgaaggcttaacggtaattgccggcaatgctttccaagatgatcaaattgaaattaagacagcgctcgaaatgggcttgccagttgtgcgttatcaccaattcttaggcgaactcttaaaaaattatacaagtatcggtgttgctggtgcgcatggtaaaacaagtacgagtgggttactagcacacgttttaagtggcgttgccaaaacaagtttcttagttggtgatgggacaggtaagggcatcaaggatgcacaattcttcgcttttgaagcggatgaatatcgtcgtcatttcttagcttactcaccagattatttaatcatgaccaacatcgactttgatcaccctgattattatacggggatcgaagatgttttcgatgctttccaatcagaagcttacaaggttcaaaaagggatttttgcctggggcgacgatccagaattaagaaaactaaaatcaaacgcaccaatttattactatggaactaaatcaaatgatgatttccaagcacgtaatattcaacggactgttgaaggatcagaatttgatgcttattatcacgatgaaaatatcggacattaccacgtgccattatacggcgaacacaacgtacttaatagtttagctgtcattgccgttagttacctcgaaaaaattgatggtcgtgaagttgcacgtgaattggcagacttcaaaggtgttaaacgccgctttactgaaaagaaagtcgcagatgtcacgattattgatgactatgcacatcatccatcagaaattaaagccactttggatgcagcccgtcaaaaatatccagatcgtcaaatcgtagcggtgttccaaccccatacatttacacggacaattgcattgatggatgattttgcagctagtttaaacctcgcggatgaagttttcttaacagatatcttcagttctgctcgtgaaaaatcaggtaaggtttcaagtgctgatttaggtgctaagattactaagggtggtcgggtccttaaattggataatatgtcaccattattagattttgaacaaccagtagtcgtcttcatgggtgccggcgatgttcaaaaatatgaatatgcttacgaagaattattaagcaacttaagtcctaaggataattaaagattcaggcaagatgattgtgttttagtcattttttgttacaatattgctaaccgaggattatacctcgttagaaatattaagaggtgattattcatggatggaagacgcgttgtcaatgtcgatagcgaatcacgattttttagtaaagtatacggattaatggctttaggtgttggtatttcggctctcgttgctgttttactagtcacagtttttgcaagtcaaaccgtagccattttaagcaatagtaatacttggatggtctggggattaatgattgttgagatgattttggtcgttcagattagtcgcaaagcaaccaagaatccgtcagcatcaatgatgatgtttattgcttacgccctgttgaacggattaacgttcacggtaatcttgttagcgtataacatcggtcagattggcgccgcatttatttcaagtgcgttagtctttgtcgcgatgtcagcttatggccggatgacgaagaataacttaagtggttttgggaagtttgccatgatgggcttgattgggattattattgtaaccatcgtcaatgctttcatgggctcagctgcaattgagtacttcttatcttacgcgatgttaatcgtcttcattattttaacagcctgggataaccaaaaactaagcttgttatatcgtcaatacggttcaactggggaagtttcaatctcaggattagccgtgatgggtgctttaacactttatctagatttcgttaacttatttattacaatgctccaaatctttggtttcggtaatcgagactaatttaaaaagagtgtgttgtcagtgtttagcttttgagtatttgtagaactgggcgaatcggtgatgaaatcaccaatttgacaagtttagcaaaacgcagaaagttactgacaaaagcacgtttatactagcaacattcggttatcaagaaggggtctgagacaaaagttacttttgtcccggattccttttttttatgcgtaattatgtttgacataatactatgcaaagtatagtattatattttgaaaggatgatgacatgaacgcgcaattaaagaaggggttgttagaattttgtgttttagcaacgcttaaaaaagccgattcgtatggctatcagattattaaagatacttcaagcgtcattgaaatctctgattcaactttgtatcccatcttaaaacggctcgaaaaacaagaacagattgaaagttatcaggtagctcataacggacgtttacggaaatatttccatctaacaccgattggggcggctgcgattgaacagtttttaaatgaatggacgcaagtaacagcaatctatgagtatattaaaggagaagcataatgactaaaaatgactttatcaaagacttagcagctgctttaacaagctatggtgtgagagtgatgctgccaatacaattgattattacgatgaattgattgatgatcgtattgaaggcggtgaaactgaggcggccgtaattgctagtttagagacacctcatcaaatcgctagtcaattagcagatcagtttcaaccaacacaggttcaacacaaaagaatgtcgccggtattgttagtaacgttggtcgtgttgttggtgttgggttcgccactttggggtagtttgttgttaaccgcaattgttttactcgcggttggttatttattactatggattgggccttttatcggtggtacgctggcggttgctagcatcattggtggggccgttagcttagttttttcatgttttgtcacgttaaacgaaggtgcagtagtcggcatgatgcaacttggtattagttttgcgatggtgggtgttggcatcttaatcggcggtttaacgtggtatttttcgaaatatattgtgcaattttcaatcggcttaacacggtggttgattcggaaaagtaaaagacaatcaaaggcggtggcatagatgttcgcaaaaattcgaatgaattggtttaaaattgggttattgatggttgtgattggattggtgatcatgggcgtgagttatgcgcttggtggttttgatagtcatatttttcaagagcagggcaatcatgattggtttagaacgtttaatttttaggataacaaaaaaggcacgtcctacagaattttgtaggacgtgcctttttaaacccttatttcaccaacaaaacgttagctttagcgtggctgctgacgtattgggcgaccgaaccgaccagcatccgttcaatagcgcctttaccggtaatccctaagacgatgaggtcaatgccaaattcctcagggatgcgaatcgcaatttcttttttaggagaagcaacttctagaattggggtaatcttttcaaggccgtggttgtgcgcgtaacgcacgttagcggcgagttgagattttacccgatctttctccaaagcggtcaccttggcgtacatactcgcatctggcgagacgaaaatatcattcgggacaattcgggcgacaaataattcagcgttatttcttttagcaatttcaacagcttccataaaagctttattagccatatcggaaccgtcgacaccgacaaggattttttgatatgttgttgacataagataacgtcctttctaaatagctgattgttaacattagtatattaggctgccgggctttaaacaatttaaacgcttgcggaatatgtgcggttcttgtgtggcaaaaatattttcctgcataaaaaaatagatgagaacgttgatttaacaacgttcccatctattagaattgtaccgaatgacgctaaaatgtcacaggcgagattcgaactcgcgacctacggtttagaagaccgttgctctatccagctgagctactatgacaaaaaagattggttattgcttttagaatatcaagcaacatgctatattataagcaattgaagtatctgatgtcaattgaaattcgcagaaatggggtaaaaaaatgaaattaaatcagtttgcacggttaacaaccacttattcggaacaaataaaggccttacaacggattaagctccttgatgaaggttatgaagcattgtcagttcaagcgttagcacaacaaatattcgcacggttcttcccagaggcccactcaaaaacggctcaaaatgaacaaatgcaaaaaatccaggcgacggctagtttaaacttagccgattatttggcaggcatctcaacatcgtttgatcagcggacgttttataatattgcattgcagttgctagggtttaaggttacaactgattttcaatttaatcaccctcggcgatttatggcaaaagtcgggataccctatgttgatcaaccggtattaacccaagaactctttttagaagctgtctacctcttattaacgacccgcagtcaaaacgggttgctttatttagattgtttggctaatcgtggtttctttgcgcattggcaaaaggcgaccgcacccgagttcttaatctttaatggtaaaacccaaccggtttttgatacgcaaaactttattcgtgaagtggtttatgttgaatcaagtttggataccgatttagatgggcatcttgacttgctcgaaacgacaatctttagacctaaggaaactgaaaaaggcctacgtgtaccggccttatatactgccagtccttattacaaaggcactaatgatgtcgatgccgatctgcacaacgttgatgtgcccattcaagctaaggcggccattcaacctaacttggcggatttgaagactgggaccaatcaatctgtaccagctgctagagaaccactcggagaaacgactgaaccggaattagaagccgctgatgacagtaactacctgttaaatgattatttcttagcacgggggtttgcgacggtttatgctggcggtatcgggactcggggttcagatggcatgcggacgtgtggctcaccagaagaaacggcctcaaccaccgcgattattgaatggttagcgggtaatcgtcgggcttatactaataaaacagatcggattgaaattaaggcttggtggtgcaaccaaaaagtcgccatgaccgggaagtcttatttagggaccctggcgactacggctgcgacaaccggtgttgaaggattgaaaactgtgattgctgaagcggctatctccagttggtatgattactaccgtgaaaacggcttggtggtggcgcctgttgattgccaaggagaagatgcggatgttttagcgaaactctgtcaaactagacagatggacgcagcggatcatactaaatcaggtgcgctctttgaagaacagttggcagctttacgagaaggtcaagatcggattacggggaattacaatgccttttgggcagaacgtaattatcgggacaatgttcaaaaaattaattgtgatgttgtcttggtacacggtttaaacgattggaacgttaaattgcaaaatgccggcgcactgtgggatgacttacggcaactaccaatcgaaaagaaactctttttacaccaaggacaacatatctatatgaataatatccaatcgattgattttacagatatgatgaacctatggttgagttatcagttgttagatatcgacaatcatgcatcagaaatcttaccaacggtgacaattcaggataatacgcaagaagcgacttggcatacccaagatgattggttaaaccctaagaatccacgtcaaacttatttcttaaatgacccagaacatctagggttagatcagacgccaacgacccctgtagcagatttcagcgatgatggtgttgccatgtttaaaaaacagcatctcagtgaggctgcttggcaggatcaattattagcaccacaatctgactttacgcaaaatcgcttattattattgtcacaggctcaatcgaagcaattggtgattgatggtcgggtacagttgaaaacgaaagttgcggtcaataccgatcgtggtttgttgagtgttatgttggttgattacggcttatttagccgcttaggcacaacaccagctattttggccgctaaggggcaacaattaggttatcactggcgctatgatgatttgaaggaattcaaattaggggcacttagtccttatcagttgatcactaagggccatctcaatttacagaatcgtcacaatagttatcaaaccgagacagtcgacgcaggtactttttatgaggtacaactagacttacaaccaacgcattaccatttagcggcgggacatcaattaggtttggtaatctatgcgactgatatggggatgaccttgcgggaagaacaacaaaatcaataccaagtggatctaggtgcgagtcgcttagtaattcctaccttggattaattgtgaatggagtgttttgaatggcagaaacaatcacttgtcgccaaaccttatcaattagcaatcatcgagtgtttgcgagcgatttaaacgaacacgagacggtctatggtgggcgactattggaattactagatggcgcggcgtcaattgcggcgagccgcttagcccgtgttgaaaccgtgacggccagtattgaccaattaaattttattgcgccgtttaaattacaggattcgttgtgtatcgaaagttacgtcgttggtgttggtcaccgctcaattgaagtttttacaaaaattattggtgaacatctacaaactggggagcgtttcttaggtttgacggcttttttaacctttgtcacgacggaaaaaacgccgaacttaccagagattgcaccaacgacggcagaggaagaatttatctgtgcgggttatggtcaaagaaaagtacagcgcttagctaattttaaaaatcaacaagcctttaatcaacaaattaatctcgattatccatgggattattaaccgaaaaagctagccactttagtgaccaggttcagccttttttgttagttatattttaattaggaaggaaaaaataatgactcaaacaattacagcaaacaatatagaggcctttgttgctgaagaaccgttagttattttagacttttgggcggactggtgtatgccttgtaaaatcatgacaccaatgattcaagaattgcatgcagcttctaatgacgcatttaagcttgggatggtggatgttgaagatcaacctgaattagcagaacgatatgatattcaatccgtaccaaccttattaatttttaaaaaagggaaggcagctgaaaaagtaactggtgctttccctaaagaaaaattaaaacggtatttagataagaagatagcagaatctaatcatgaaggctaaataaaaggcgagacatccaaattggacgtctcgccttttattttgttaagcttaaacaatacgacggacatagcgataaagtaataatgcgctaaattcgcagagtaggataagaacggctaatgggaggtaagtgtaactgcccatgataccgacaagtggtgataagaagatgccaaagacatacatgcctaatcctaaaacggatgaagcgataccggcttgtttgccttgtcgttggagcgctaatgaggtgacaacggcattgataagaccaagggttgaaacgactaggaataaaccaatcaatgccaaccaaagtttgttagggcctaagccactgatcaaaatacagaaaccaccgatgagccccccaatgaggcctaattttagttgttctaattcggtgaaccaattaatcagaacggttgataattctgccattaggataatcccaatgccgttaatcccgtagatgagactaaaagttgatttcgaaagtgaaaagacgttttgtaacataaaactagaaccagaaatataacagaacattgcgccgtaaacgagtccttggatgagtacgaaacagataaaggggcggtctttaaagactgtttgaacattgagtcgggtactggttgccttttgatcggctggggataacttgtgcgtttctttaaacccgaagattaacccgagtaataagagtaagccggcaccaccgatgaaaccgaagataccttgccaggaagtataacgcaacaggagactaccaattaatggtgagataatcgggaaaatcccgttaatggccatcaacaatgcgataaacttagtcagttgtttgccgttaaagagatccttggcaacggcccgggtgacaacttggccagcagaacttgcaagtccttggataaatctaagtaaaaagaataaccagatattatgtgtaacaagtgatagaaaacaagcgataatagccagtgatgtcccaatcaccaacggctttttgcgaccgacgcgatcactccaggcccccatgaaaatgggaccaattgccaaaccggctaaacacatcgttaaactgatctgaatcatggaagcggaagtgtgaaaatcagactccataattggaaatgccggtaaatacatatcgactaataatggaccataagcgctcaaagagccgagtagaacggatagccagatgatccttgattttgaataatgcatgaaaaccctcctagataagctgaaaaaaagtccaaaaaaatagcccgtcataaacgtagctctcgcagtacgtattcgaataggtgctataaatgttgcttccttattagattaacatagatgaggaagcatgaggggctctatgagcaatttttaatcagatttgttgtttctatttaagtttaaacaagttatgatggagatattgagaaaagaattgagtgagggtttgtatgaaaattgcacaaaaaaataaaattctagaaacctgcttaattgcggggcgcatcatgatcgaaagtggttctgaaatgtaccgagttgaagatacgatgaaccgaattgcttataatgctggtattcaaaagagtgtggtctttacgacaccgactggcttatttatcgggattgaaaatcaaccttatgtgcaattggaatcagttgcagtgcgtacgattaacttagaaaaagttgaaaatgtcaatacagcttcgcgacagtttgcgacaaaggaaattacgttagatcagttgagtacccgcttgaaacaaattgaccaacatacgccgtattttccattatggattcaaattattgcggcggcctttgtatcagcgctattaatgattattttttccggtgaatatgactgggctgatttattaccagcggctttagtgggggcattagggtatgccgttttctctgaaataaaccgtttgactagcattcggtttatcggcgagtttttaggggccgtttcaattggcgtgtcagcttacttattaacgaagtggcacctaggggtcgatctcgataacattattatcggggccgtgatgccacttgtgcctggtgtggcaattacgaattcaattcgagatatgttggccggacacttattatccggaatggtccgtggtgttgaggcgcttttaagtgcctttgcgattgggactgggattgcgttaatctttagatttttaatttaatgaaggtggtgtgacgtatgccatattggctacaatttattgtccaagcgagctttagttatttttcaacggtcgcctttggaatctgtattaatttaccgcgccgagcattagtttggtgtgggattgctggtatgctcggctggcaagtttactgggtgttgttcaatcttggtagtggtcggatgatggctaatttatttggtgcgttagccgtcggcattgtcgggagtattttggcccgttacaaacgcatgcccgttattattttcaatattccaggcttggtaccattagtgcccggtggaacagcttatcgggcggttcgaaatcttgttttagggaacatctcacaggctgtgacgcagagtatttcagtcattatggtggccggcgcaattgcagttggctttatgtttgcacaaattctagcggatattacaagaaaaagaagtagtgtgccaatttggctttcaagacactaaaaagtatgttatactactgttatgcgatgagtcgagtaagtctcgataggcaactattctgcgaaagcagctaggagacccaaagatacaggatgccacgattattaatttaatcacttaccgtattgtaagggtgttttcgcccgctgtgttgtggagcacatggtgtttattcttcggaatactgtcgagaaagatctttccttttaggaaaggtctttttttgtggcttaaatcgggttttctgtaaattttagcttaaaaattgaaagaaataatgtgatttaatggccttttgcgaattatttcagaaattagggcttacttaatgcaaaaaaagtagttttcgtttacaataagtaagtattgaaaaggaaatgagggatagagatgactattacatatgttgtgatcaatattatcattatgttgatcatgttatttgttctaaataagatggcgcggattcacgttaaattcagtcgacgggttttcacggcattaggtgtcggtattttgtttggtgctattttacaattaatttttaaaaccgactcacaagtagtgaaacaaacggctgattggattgggattgtcgggaatggttatgtatcattcttgaagatgatcgtgatgccattagtcatggtttcaatcattcaagctattaccaacttagaaacatctaagggcttggggaaaatggccggaatggtcattggtttattagttttcacaacgttaattgctgcaactgttggttcagtgacgtcaaacgtgtttgatttaaatgccagttcaattcaatcaggacaagttgaaaaggcacgttcaaaagaattagaaacaaaattaggggatgtccaagaacaaaccgtccctgaaaagattgtcagcttcattccagaaaatccatttatggacatgactggtgcgcggccaacgtcaactttaggcgttgttattttctcagcgttcttggggctagctgccttacaattacgccggaagaaaccggaacaagcagagacgtttaataaaattgtcaatgccttttacgccgttatcatgcgaatggttactttaatcttgagaatgacaccgtacggggttttagcattaatgacaacgacggtggcccaaacagatgtccaaggtatcttgaacttagggaagttcgtgatcgcctcgtacgtcgctttaatcatcatgtttatcgttcatttcctattgatcacctttacgggcttaaacccaattaattacattaaaaaggttattccaaccttaatctttgcctttacctcacggacaagtgcgggctcaattccaatgaatattgaaacccaaacaaaacgtttaggggtcgaagaaggcatcgccaacttatcagcttcatttggcgcttcaatcggtcaaaacggctgtgctggtgtttacccagccatgttagctgttatgattgcaccaacggttgggattaatccttggagcatcggcttcttggttaaattaatcttaatcgtggctatcagctcatttggggttgccggtgtcggtggtggcgcaacatttgccgctttaattgttctttcttcaatgaacttaccagttggattagccggtcttttaatctcaatcgaaccattaatcgatatgggtcggacagcattgaacgttaatggttcaatgactgttggggtgttgacggcacaattcttaggtaaactagataagcacaagtttaatgacatgacgttaacagaagattctgacgatattgcttaattttaaattggagggataacaatgcgaactattattgtaggtgcaacggcagctggcacgagtgcagcggctaaggctaaacgaatgaacccagaactagaagttgtaatgtatgaaatgcgggattacgtctcctttggtgcgtgtggcttaccatactttgttggcgagcattttgataatcccaaccaaatgattgctagaacgcctgaagcctttgctaaacaaggcatcgacgtgcaattagaacatgaagtcgttgcggttgattttgacacacagatggttactgttcgtgatttaaaaacaaagcaagccaaaacagaacattacgatcaattaatgttagcgactggggcaaccgcagtcatgccaccgtttgaaaatggtcagttagataatatttatcatttacggacgttggctgatggtgaagtactccgtcaattaggccaaacacctgaaattcaatccgtaacggtgattggtgctggctttattggcttagaaattgctgaagagttccatcaattaggtaaaaaggtacgggttattcaattagaagatcgcgtcttgccacttgcatttgatccagaattaacggctatgatggccgctgatttacgcgataatggtatcgagttacgattatcagaagccgttcagtcatttgaagggcaatcgaaggtaacgggtgttgtaactgataaaggccgctacgcaacagacttggtcgttgtcgcagctgggattcgccctaatacgcaatttattacggatgatcggcttaaaaaacttaaaaatggtgcgattgtcgtcgatcaaacagggcggacatcaatcgaaaatgttttcgcagcaggcgataatgccacggtaattaacagtgtgaccggcgagcccatgtattctgctttagccactggtgctaacaagttaggtcgcgttgtgggcgttaatttagcggggcaacaagcgcaattaccagggatgctaaattcagccggggtcaaattagtgacccttgaagctggacggacaggattaacttctgccgaagcacaagcagctggcattgattatgatactgttttgatccacgataagaatcataccgattattatccaggacaatcagaactgacgattaaattagtttataaaaaagcagatcatgttttaattggtggtcaaattattgggcaaaaggatgcagttttgcgggttgatgtacttgcaactgccattcaagcgcaaatgacaactgagcaattgggactgttagacctcgtctacgcaccgccatttgcaagaacttgggatgcattaaatgttgccggaaacgtggctcattaggtgatttaagaaaaagggatgacaaattaaattttgttgtcccttttttagtactttctaaaaaagggtgaaagcgtgcaaacttgattaatggggctaaattgtgctaagattgcttttagaaattatttttttttaaagatatttaggatttacttacgaatattaaaaaatgccaaatataaaatcacgattaggagataagttaatgaacaacacgaagagtttaattgcacttggttcaggtatcttaggagttgctgggattagtttactcagtgcaagtcaagccaacgccgcaaccgcaacagtcaattactcagctggtgcaacgacagtttggacaagtcctgaaaccggccaagcagctaaacgatacatttttaaagggcaatcagttaatctactcgcttcacaaaaagtaggtgctgaaacttggtatcggattggtaacggcgaatgggtgccagaacgctatttgacgactgctaaggaaacacctaaggcacaaacagatgctgctaaaacgattcgtgttgctttcgcggatggtgccataactgtctggtcatcaccaacttatacacaacctaccggccgttatatgacttacggtcaaactgaaggcgttataaaaacacaaactgtctcaggtgaagaatggtaccaattagctaatggcggttgggttcctgctcgttttacaggtgaaggtcaattgaagagcacacctgttgttaaacaagcagcaacaccaacgcaaacaacacctactcaagcaccagttcaatcaacgactgctgctaaggtagtgacgccagccgctgaaacagtaacctcagaaaggacatcggtagcaataccagcgccagttgcctcatcatcagtttcagaaagtgttgcttcaagtacacctgtctcagaatcaacagcagctcctgttgcatcagaaagccaagctgaatctatttcagcgccagcagcctcatcatctgtcgttgaaagtagtagtataacgtcagaatcaacagcgccggttgctgaaagtagtgtgacatctgaatcaacagcaccagctgttgaaagttcaattgcaccagcacaaagctcatctgcatcagcagtagaagtacctgctaaagaaacggttgaatcagcaccacaagcgacaccaattcaagcagaatctgcgactgtttcatcaacgacaccttcaacgccagttgttgaaagtagtacacaacaaacaacacctaaagcaccagcacaacaatcgtctgttgccgaaagcaaaccagctgttgttgaaagtactaaaccaacaacgccaacacaaacaacacctacaccagcgcctacaacaccaaaacctgcaacgccagcaccaacaactggtaatgcacaagctgttatcaatttagcaatggctcaaattggtaaaccttatgtttggggtgctcatggcccaagtagctttgattgttctggtttgatggactatgtcttccaaaatgcagccggtcggagtatcggtggctggacagtccctcaagaaagtgccggttattctgtttcattaagcagcttacaacctggagacttattattctggggtgcacaaggcagctcataccacgttgctttatatatcggtggtggtcaatacgtccacgcaccacaacctggtgaaaatgttaaaattggttcaatgcaatattacacaccaagctttgctaaacgtgtcttctaaacacttaaaaattaaaacatctcacgttctgtgggatgttttttgtgttttagatcaaaataagctatgctaggtagaacatcaaaaaaggactgatgaaatgaaaatcggcgtacaagcatttattaatgaaattcaagatcaaacttatttaacagatgaatatgaaatagcaacacccaacccatttgtggcggctgactttttggcacagttgaaacccgctgtcagtaaggctgttgaaaaacaagcattggcttctttttcagcattgaccacttatgaaggcgaacaagtgaaggtgacgctagaaacgggcgttgtgaatttaccattacaatacatcaaaaaggttaaccaatttttagaattagaagcacaagcagaagtgaatatttatctttatgtcacttcaccactagtgaaccgctcgggaatgcggattgacctcattgggactgttgctgactttgaagaacaagctgatcaagcatgggccaaagtcgaacaactattaacacaagatttagaagctgttgaagcaggtgctaagttggccaaagaagcgccagttgaagcctctaaggcccctgctaagaaaaaagtaacacctaagaagaaaacggcggctaaaaaaacaaccactaagaaaaaggcgacaaccaccaagaagaaaccagcaacaaagaaaacaacaactaaaaagacagccgctaagaagacaacgactaagaaaaaaagtgacgcttaaagcaagtattaaaaaaggtctgggacaaaagtaaattttgtctcagacccttttttaatactcgaatattgatggtccacttttttaatctgcttgttcaattgcttgttggattggtaagtcaccatttacaaatgaatacttgtggtgaattgtttgttctggcttttcaagaacggcttgaatcattgctgcaacatcagcacgggcaactttcccgccagttggttgcatagtgaattgcgctgtaccggcatcattggttaatgtgccgggtctgaggatagtccagtccaaaccagagaattcaagccagtgatcagcgtagtatttagcggcataataaggcttgatgctttctggccattttgcgcggtcttcaacgaagagtgcactgaccatgacatagcgtttcacatccgcgattttagcagccgccatacttttaacagcgccgtctaaatcgactaatagcgtttgatcatcaccagttttaccaccggaaccagcagtaaagacgatggcgtcatgttcagcgaaaagaggtgctagttctttaggttgtttcgttaagtcaaaagaaacgggtgtcgcacctaatgctgtcatttcagttgcttgtgcctcattgcgaatacctgcagagacgttgtgacctgctgcaacgagtttgggaattagtaattgaccgatgttaccatgggcaccaataacgaatattttcataatagagactcctttgctgattatcttaagattcattatagtagttattattagtaagtgcaaagtaaaagactcgtgttatagcacaattagtaaaacaattataaatcgttttttctaatgtgatttatgagatttaaataagaaatataggcgatgcatagacgttaaataaacctttttatataattaacatggtaaagcttgccaaccatttaataaccttctcataatcacataaatatgcttattgtaatataatgaactgttattcaatttgtgttatggtacaggtataaggattgtgatgtattttacaataacctaatttaacaagctgttatttaatttttcttgaggagaggcgtttagaatgacaaaccaatatcgtagtgtttttgatattattggaccgattatgattggaccatccagctcacatactgctggtgcggttgctatcggacacgttgccaatcggcttttccatgctccgattcaaaaggtcattgtgcgttattatgaatcttttgcacagacccatcaaggtcatggaacggattacgccattattagtggcgttttgggatttgatcctgctgatcaacgagtaccgatggcggttgatttagctcgtcgtcaggggattgaagtcgaattcattgaagatcctggtgatagtccagtcaatcatcccaatactgctgagttaacgcttattaattcgcaaaaatcactaacgaattggggttgttcaatcgggggtgggacaatcgaaattcggaaggtcgatttaaacggcattatcttccaacctgatgggccactacccattattttcgttgaagccgatcaagagattgggactgctttggaccacatcttcaaggataattaccgggatgcgcggatttcggttcgtgtaccaggacgcttcttgtataaattagagttacttgataagccatatccagaacaagttgaacaggttcgcggtatgagtaaagatatgattgtattatagaaggcggtgaaatgggatgtacacaaaaattcatgagttagttcaaacagcgcaagaacgacaactcccaatttcggaattaattatcgagcaagaaatcaagatgagccattctagtcgagaaattatctgggcaacaatggggaagaacttagatgtcatgcttgctgcggaagaaaaaggggtaaccggcgaaggcgttcagtcagcaaccgggattactggtggtgaagccgttttgatgaaacggtatcgcgaaaaagggcaatcgctatcaggtgatatcatgttggaagccgttcaaaatgccattgcaacaaatgaagttaatgcgtcaatggggattatttgtgcaacaccaacggcaggttctgcaggtactttaccaggtattttatcggtgattacaaaacagttatcactcgatcgtgatgcgcagattcgtttcttattttgtgcgtctgcttttgggatggttgttgctaatgatgcgatgattgcgggtgcaacaggtggttgccaagcagaagtcggaagtgcctcagcaatgggggcggccgcagcagtcgaagcagctggtggaacaccacaacaatcttcagaagcttttgcaatggccatgtctaatttattaggattagtttgtgatcccgtcgcagggttagttgaagtgccatgtgttaagcggaatgtgattgggtccgtcaacgctttaacaagtgctgatatggcacttgctggtttagtaagtaaaattccagctgatgaggtcattagtgcaatgaagagtattggtgaaaacctaccttcaacactgagagaaactggcttaggcggtttagcagcaacaccaactgggattgcgcttaaaatgcaaatttttggtcaagatatgagtattgataaataaatagctttgctattttaggaggaaattcgatgcaaaagaagctttcaaaatcagcatacggtggcatttcgggagaaaagtatgtcccgtatgtcagccaagggaataagaaagtcggtaatacagccattttaattatggggagcttattagctattattttcgcagcttccacagcttattcaggaatgaaggccggtttaactgttgcggccggcattccaggttcaatcattggttcaggtttagtaggggctttcgctaaatcaaaagggattttaggtaaaaatatcatgcaagggatgtccagtggtggggaatcaatcgccagtgggatgatttatgttttaccagccatcgttttaattggtggtcatatcaactttattgaaggattaattgttgggattttagcaattctcttttcaattgggacatcttcattagtgcataactacttagttgttgaagaacatggtaacttggtttatccagaagccatggcgatttcagaagcgctagttgcttctgatactggtggcgattctttgaaatacatgggaattggctttggtatcggtggcgttattacgatgttaacaacttctgtttttggtgttgttaacaatatgatgaactatgttggctcatcattttataaatggaaattagacgttgaagttaaccccttactagcagggattgggttcattgttgggttagaagtcgcattaacaatgtttgcgggtgctttattatcaaactttgccattgcaccacttatcggttactttactgatatggctggcaacggcgctcatgtttggaataacgcaagcttagctgttaaccaaatgacagttaacgatttagcaagttcatacgttaaatatattggtgctgggatgatgctttgtggtggtttaattggtgccattaaattaatcccaacaattgtcacatcaatcaagaagacattaaacgctaaaaacacaacaggtgaagataaaaacacacttggcatggtttcaattgtacttggtgctgttgggatctttgtaattggtattattattgcccaaaacttcatgatggggattgttggtgcactattagctgttatcttaagtttattatttgttatcgtatcagctcgaattgccggtacaattggttgttctaacttacctgtatcagggatgacaattgcttcattagtgattatgacggttgtcttcgtcttattcggttggacaagcaatgcgcatacacaaatcttattaatgtttgggactttcgttgtgacagcaatcgctgttggtggtggctacatgcaatcacaaaaagtaacttatgttatcggtggttctaaatcagaaatgatgaaatacttcatgatttcagcatttatcggtgttgttgttgttattgggacaatcagtatcttatcaccacaatttgtcacagacagtgcaacacctgcttttggtttgccacaagctaacttaatcgcaacgttaacatcaggtattatgtctggtgaattaccatggattatgattatcgttggggttgcaatggccattgtattatacttcttagaattaccaattatgactgttgcgattggtttttacttaccaatttcaacaacatcaatcattttaattggtgctttaattaaagtgtttatcgataaagttactggtgatgaagctgttaagaataatcgaatccaaagtgggattagtttatcttcaggtttaatcgctggtggttcaattatcggcttaatcgggattatcctccatgtcacaggtgttctaaaagaccgcgtgatttcaggttttgcaagcagtaacgaaatggcattgattctcttagttgtcatgattgttgcgattgcagcaccattgatgatgatcaaaaaaggaggagatagcgaagatgaggaagcaaaaggctgaagttgatttaaatcaactaatctttgctaaggtcccagaagttaagtttcaattaaaagcgggacaggtaaccattattcgtcctcaggatcattggattcaacgattctttagacggttacacgtcagaattccagctgaatcaaaattgacgctggatgattatggtagtttcgtatttagacacgttaatggtcagcggagtgtttatcagattggccaagcactcgcagccgaatatgatgaaacaaacgactatctatatgaacgattactcgtttatttaaatcatttagaacaaactgaacatttaatcaaacgtgtgacggattgagttaattaaagttgtgaatcatgattaaaatagcttatagataaaggagtttttcaaatgacagacagaatcgagttatccgcatgtacttcaatgatggtgggcaagaatgcgtcaattgatggctctacgatgatttcgcgtaatgaagatcgcttttatgcgatccaccctaaacgtttcttcgtacaaccagcagtgcacaatcggcacgaaacatatgtttctaaatataatgggttaaccatgccattaccagaagaaggttatcgttatacctctacccctaatggtgatttaagtgatggtttgaatgaagaagacggcattaacgaaaaaaacgtcgcactttctgcaacggaaagtgtctacgctaacgaacgggttttagcatacgatccgttgattaagaatggtttagcagaagactcaatgtgttcactcgtattaccatacattaactcagcacgtgaaggggttaaattgatgggcgatatcgttacgaaatacggctcagccgaaggtaacggtattcaatacagtgatgaaaatgaagtttggtatcaagaaatcgtaacaggtcaccactgggtagccgttaagattccagacgactgttacgcagttgcagcaaaccaagttgcaattgaaaatattgattttaatgaccctgataactatatgtggtcagagggcattcaagaatttgttagtggaaatcacttgaacccaagtgagacagaatggaatttccggaagatttttggaacagatacggaaaaagaccggcactataacacaccacgtgtttggtacgcacaacgttatctcaatccagaaattaaacaagaaccagaatcaagtgatttaccatttatccggaaagcaaatcgcaaattaagtgtggaagatgttcaatatgtgttaaaatcacattataacgaaacagaatacgatccacttggtaatgggacggaagaacaaaagacgacttatcgtgcaatttcgctttcacggacacaaaattcccatatttgtcagattagaaataatgtgcctgatgcggtgaaaggtgttcaatggttaggttttggtgtaccgacattctgccctcacgtgcctttctttacgaatgcaaatgatacggatgaaacttatcgtgaattgccagaaaagatgaccttaaagaatgcttattggttacatgaagcattagcaatgattgttgaatcgcattatggtgcgtttaaacaagctgatatcgattatcaaaaggcattatcagaatgggcaagaactaagattgctgcaactgataaagcaattgaaaatcaagctgacgcagtggcctttttgacggctcaaaatcatgagattgcaacgcattataatgaagcaacaactgatttgttagcacagttagtcacagaaggcacgcaattgtctaagttgacctttgtaatggataagaatctttaagagaatcggacttttaattaatttgtcacacttccaaggggggagtgtgacttttttgatggaggtgctgagaatgactgatttaaaaatgagttccaagcgaattgtaatcgcaatggtttatggttttttagcagcggtcagtgtgaatctattcttgattcctgctaagacgtattcaagtggtgtgacgggggttgcacaattattaacagcgctagtgtcacaccttggtggttctttgagtgtggcggccttagtgtttatcctgaatgtgccgctgttagtattggcatggtttaaaatcaatcatcaatatgcaattttcagtattgttgcggtttttacaagtgtcatttttctaaaaatcattccagtaccagttcaacccattctaacggaacgctttgcgggtgctctgtttggtggggcattaattggccttggtgttggtctttgttttagagctggtttttccactgggggaactgatgttattgtgacccttgttggtcggttaacaggcaagcgagtgggtgccgtgaacaacgtcattaacggcatgattatcctcgctgctggtattttctttggttggggtgctgctttatatagtatcgttgaaatcttcgtatcgagcttattaatggactatatttacacgcaacaacaaaaggtgacagtaacgatttttacgaagcagcctgaagcgttaaagaaacgaatgcgcgaatttatccatggtgcgaccgaattggatgggacgggcttatatacgaatcaggagacatctgtgattatgacagttgtttctaaatatgatttgaccgcccttaaattagtggtgcaagatgcagatccaaatgcgtttgttaatattcaatcgacaatgaatttatggggtcgctttgaaagtaatgaataaaaaagagccgattcaacaagattaattgttgaatcggctcttttaggactattttgttttagcggctttcaattgtttaagattaacaacaattttgttgtttaattccgaaacgttagctttatcaactgcgtcgaaatccgtgatggtgactaaagctgagttttcatataccttttcgacagttcctgtaaaagctgactctagatcttcgttgactttaccagtgacaatatcaccgatattgagattttctttatccatcgtaaaaactcctttagacataataaaattaccaaataaggtgataataaactatgtcactctaaatagcaagctctaaccaagtaaaaagaaaataaatcggtgacacaattgctgatagctatttaatttataaagtaaataggctagaatagagttatgttagcgattacaaaagcggctgaaaaaggagttattatggaaccttacttagttttttcagatattgatgggacattagtcattgatcatcaaattgtcacaccatttacgaagcgggttattcgagaactacagcaacgagatgtgatattttatattgcaaccggacgaatgtataatcttggaaaagtaattgcacgtcaaattaatgatgatgcacgaattattgcctctaatggtgctgtaattgaaaatgagcaaggaagtgttcaacatcatttaggccacgctgcgctaaaagcagcttacgaaatcacacaatcagatccgcgattatcagcccatttttttacgactgatgcggcatattatacacgtttccgcggtttgtggcacgtgatgcggggaacctcaccagtatgggggccgaaattgcttatgactcagtcaatgatttagatactttgctagcgatgagtaatcagattattaatggtgttattgttgcgaaaggtgaaccagcattactagcgtcagtgaaacaatacctagctgaacaagatgtgatgaatttatcatcatccggaccggataatatcgaattaattcctaagggaatcgataaggcaacggcgattcgccaaattcaaaccctacatgggattgatgcagatcatacctttgtttttggggatggtcaaaatgatcttggcatgttacaagcggctaagtatagtgttgcaatgggaaatgctttaccagaagtaaaagcagtcgctaattatgtgacggagagtaatgttaacgatggtgtcgctaagtttttacaaaaacattttgaattatcattatcagattcagaagttggcctttagggacttgacccgctttttatttttcgatatacttatatcacggtcatcaattagccgtgattatgctgttttagctcagtaggtagagcatcaccatggtaaggtgggggtcgtcggttcaaatccgataaacagcttaataatcattcgaattaaagactgttgctaatgtgcaacggtctttttttgtaccaaaaaaggaaacgcttaggcaatcgtttccttagtggttgtaatgttttggtagtattgaggatcgaggctagtaatgagtgggctgagggtaccaattcccaacaaggttaagtcgtgcatggcacgcgtcatcagtgtgtagagtaagtcaacgtcacttgattggccaaaggtggttgctgaaatgtcgtaaccaatgacagcatcgaattcgagacctttagcgagatataacggtaatactaaaacaccttttggcaatgagcgggtggtttcggagatgagtgttacctgatcatcgggagtcaggctggcgaaaagttggcgcgccgtttgttgatccttggttaaaatggcgatagttgcatgccgtttttgtaggtggaaaatttcttgcgttaaggcatttaaactagcttccttagtggctgtgatgacacgagggagccgtccatcacgactaaaggcttgcaaggctgtttctttagacaataaggcttttgcgaaattcgtgatgggggcagtcgcgcgatagctcttcgtcaaactaatttggttagtttttagttttggaaaagccgcgcagaggcgttcaatgaaattaccggcttgataagtagcggtaaagacgtcctgcgcgtaatcgccgagcacggtgaatttagcgttcgggaaagcatgctggagataaacgaattgcgcaatgctataatcttgcatctcatcgacgaataagtattgaatgctgtgattttgaccactatcggttaataaatcacggagatacagaattggcgctgcgtcacttaaaccgacgaggtggcgttcattattttgagcgactgtttcaatcattgcttcccaaacggcaaccggaattatagccggacaagctgtccgtaagaagttttgatattcagtatacacatccaaaaagtaatcgttataaatagcatcgtataaatcggcaaaataattttgaacaatttcccgggcaataaatgcttgttctaaatcgccagaatcaaattcgcgatcaccgacgatggcacggtagtcatcatctgataaggtatcaattttttcagcgacccaatcaaggtgcacttctaaattaatttggcgtttgagtcgtttaatgagggtatttttagtggcaataaatttatcaccgggacgcatattatgtgggagatcgagataaattttattaatttgcgcttttgtgaagaacggacgatcttcaaagtagaggtcattgaaggccaatggctgtgtagaaacctgtttaacataatccgtaatttgttgcataaagggggcactttctttaaagcggcgtattgcttgcgtcatttctgggaaactcgcttggtctttttcaaaacgatcgaagagtgtttcaacttgaagccccgagaaacgatgacttaaaaattcagccatcgtcacttggcgcatattcttttcccctaaactaggcagcacctcagaaatatagtgactgaataagcgattaggtgaaaaaaggaccatttgatcggcttctaagtgactacgactgtgatagagtaagaaagcgatgcgttgtaaaacagcggaggttttaccgctgccagcgacgccttggacaattagtaaatcggcagtcgtatcacggataatatcattttgttctttttgaattgttgcaacgatattttgcatgtactcatcactttgttggccgaggacggcttgcaggagttcgtcgccaactgtttcgtttgtatcaaaaagatgttcaatttgaccgtttttaatcttgaactgtcgttttagtgttaaatcaactttaacggggccattaggcgtgtcgtaactgacggttcctaatgtgccattatagtaaatactagcaatgggtgctcgccaatcgtaaaccaagaattggtcttgctcgttgataaaagtggcggtcccgatgtagagtgattcttcctcaccgtcttcattgatatcaatccgaccaaaataaggagagtcgactaaatccgttagccgtttttgttgtgacgttaggagtttttcgttttcaacggccgctgcgactagttgtttttgctgttggacggcggcattggtttccatccggtcatcgacctccgtaatattgaccttggtagtatcaccataacgttgttcaatatctttagtttcattataggcattgtccaattgctggttgataaccgttagccgttgattgacttggtcaaccgttaaatcaacacgggcttgttcttgttgttgcgtatcttcttgtagcatggcgacctccagatgttagttattatattatagtcgtgttattagaaaaaagcgaccgtttgacattcattttaaaatccgttagtatgacagtaattcaacaaacagagtgaaggataagtagcaactttaactttttgtacaggaagcggcggtactgagaagtcgtcaaaagcaagttgtgaatgggcctttaatcgggagctggtgataagccagttcgggtagcgcccttatcgcataagtggcacgattttttcgtgcaatttaggtggtaccacgtctaagcgtcctaattgtgaacaacaattaggacgcttttttagttgataagtaaaaattggaggactttattatggcaaaaaaaatcatcttaaccggcgatcgaccaactggtaaattacacattgggcattacatcggatcattgcgcaaccgagttgcgatgcaagactcaggcgaatacgaagcattcattatgattgctgatcaacaagccttaacggataatgcgcgcgatcctgaaaagattcgtaacagcctttttcaagtcgctttggattatttatcagtgggcatcgatcctgctaaaacaaccgtctttgtgcaatcgcaaattccagctttaagtgaattaacaatgcattacttgaaccttgtgacggtttcgcggttgcaacgcaacccaactgttaaggctgaaattcaacaaaagaactttgaacaaagtattccagctggttttttaatttaccctgttagtcaagctgctgatattacagcgttcaaagcaacaaccgtcccagttggtgatgatcaagaaccaatgttggaacaaacccgcgaaatcgtccggacgttcaataacgtttatggccaagaaattttggttgaaccagaaggcgtcttcccaccaaaaggtgaaggtcgcttacctggcttagacgggaacgccaagatgagtaagtcattgggcaacgccatctacctatcagacgacgctgaaacgcttgaaaagaaagtcatgtcaatgtacactgatccattgcatatcaaagtaaccgatcctggtcacattgaaggcaacactgtctttacttatttagatgcttttgatgatgatcatgaaaaagtggctgaactcaaagcacaatatcaagctggtggtttgggtgatgtgaagattaaacgttacttaaacgaagtcttgcaagctaaattcgcaccaattcgtgaacgtcgtgctgaattcgaaaagaatccagcagccgtttataagatgttagaagaaggtagcaagaaagcaaatgccgttgcagaacaaacgcttaaagaagtacgcgatgcaatggggattaattatttcaactaaattttgttaatgaaagcttgattgaacgccagttaggagatcaatcaagcttttcttatggcattaaaaaagtgaaaaaagttaagcctttttatggtaatttactagtgcatatgagaaacttaactcaatttattgagtctgaaaatgctctttcaatcaaccgcagtgggttatatttagcgcgtgagaaaaagggggaattcatatgcatgattttactaagggtaatccattaaaagtgattattttgtttaccggaccattgttgattggtaatatttttcaacaattatacagtgttattgatactctaattgttggacgaacaattggtgtcaatgccttggcagctgttgggtcgactggtggcttaaatatgctgattattggtttttgtacagggacgacagctggtttatcgattttgacagcccaacgttatggtgcacaagattatcgcggtgtgaagcgtagttttgcaaccagtatcctaattagtttggtgattacagtaatcttaaccattttgagtatggtgttttcgcggcagatattagttttgatgaagacaccaacggcgattattgctgatgcccagcagtttattatgataattttcgctggtatttttgcttccatggcttttaatttattatcgaatattatccgagcactgggtgatagtcgaaccccactttttttcttaattgtgggcgtggtggttaatatcgttttagattttatctttattttaggatttaaaatgggtgttgaaggggctggatttgcaacagtttccgcgcaagtggtttctgctgtattatgcttaatttatatttatcgacggattccagccttggttttacggcgtaaagattttcggataacgcccaaagaagttcgtgagcatttaaaagtaggcttaccgatgggatttcaatcctcaattattgccattggagccattgttattcagattatgttgaatacactaggtgcaagcgcagtcgcagcctatacggcagctggcaaaatagatcaacttgcaaaccaagtcggtaattcatttggtgttgcactggcgacctatgcggctcagaattatggggctcggcagtacgatcgaatccgggtgggcgtgcggcaaacgttattggtgtcgattacctttagtattataatgggggctttaattattacttttggccgaccattagtgaatatctttatcgggacgcaacagccgcacgtaacggcgttagcgcaaatttatttccgctataatagtagttgttactttattttagcgatcctgtttgcgattcgctatacactacagggcttagggcagagtgtgatgccaacgctagcaggattggctgagttattaatgcggatttttgcaggcattatcttagtgaggatgcttggctttaccggggctagcatggccaatccattagcttggattggttcatgtttagtcttattgggatcatactttaagaccatgcggcagttaaaacgaagagcagcaaagcaaacgaaaaaaaaggagtccccaaatgtttaaaaaacgattcattggcgttgttgcgctattagcacttgtattagcgggctgtcaggctgaacaaacaacgacccataaaccgacacaaacaacgacgactcacaagcaaaccaaagcaacgaccactttatcgaataagacgtttaaaagtggtgataagccgtatctggttgttaaccataacaaatcgacgttagatgtgcgccaatggcaaaccgaacggattaaatatggggcgcgttagacgatttgaatcggacgacaaccaatacagcttatttatcacatgatacgttgggacgttccaatacacgtgaacggcaaaattggcggccaaccggctggcataaccagcccgtgatgattgatggccaccgagtaatacctcagaatcgtggtcatctgattgcctatgcaatatcttttaacttcgatgaagatggcgtttttaagaagggacaattgggcagtagtgacaatcctaagaatttagccacccaaaccgaattcagtaaccagcggacgatgcagatttttgaagatcaggttcgccaagctttaattcggcataaaaaagtaatctatcaagtgacgactgttttccgcggatcagaattgatgccacgtggttattgggtacaagcaatttcaacagataagacattgaattttaacgcctatgtttggaatgttgagccaaagatgcagttcgattatgcaaccggccgtggtcgtgttgatcaaacaatgaaggttgccgattattacccgggcaatcgttatacaaaatagtaagtaaaaaagattggcaaccaagtttgactgccgatcttttttaattagaggagaaatgatgatgacagtaaaaaaagcacaagcaccgattttaatggcgactttaagtccctaccaggaagcatattttgaaacggatgaagcctatgaaaatcagttaattactgagatgccgttaaaagaagtcacaattaatatggcctatttcaagggcagccactttaaaaatgtgcaatttgaacaggtgacgtttgataattgtgattttcaagacgttttttttgagcattgcgcgttattaaactgttcgtttatcggcaatacttttcagcgagtggcttttgaaggctgccagttagtcggggctgattttgccgaagctggtttgcgggatgtccgctttggcgcttgcaaattggattatgcggggttcaaccaaacacgaatccgacatgtggattttgaagaatgctcgctacaagaagtggcgtttgaatatgtcgactggcagtggttgacgatgagcggtaatgatttgaacgggattgatttgacggggactaatttaaaagcatttgatttgagtcacaatacgtttgaaaaagcggtcttctcactcgatttattgcgtggcgcaaccgttagctctgcccagacgttagtcattatgagtgctttacggattaatgtgcgttaggtgtaactaacataattgtcattttgctgagtttttctgttggatagcttataattaaggtatctcattatcaagaggagactaaaatgaaaaatttgggtagacgcatttatcaaggaatccagcgccatttaacactattaaaaggcctctttatcttatcagtcttagtatttgtgatctttgaagtcggtcgtatttttcgagatctcaacggagaacaattacgcgcaagtttgaccacgcagagtccgttaacgttactagcgatgctcgtaattggttttttagcgatattaccaatgctcaattatgactttgtcattgcggagttgttaccagaagagtattcgttttggtataaggtcaaatcaggctggattgttaatacatttacgaatatcgccggctttggcggctttttaggtgctagtttacgggctaacttctacggtaaaaaagcttcgcaaaaagaaatcttaattgcaatttcaaagattgcactctttttattagcgggtctttcgatttggtgtttaattagcatcgtcttaatctttggctttggcattggtcaaatttatgccaactactggttatggttagtcggcggggcttgttatttcccagtattactcggaagtacccgtctgaagaacgcggcattttttagtgatttatccgttaaacggattttgcgcttaacggcaggctcattctttgaatggggttttgctggtggcttcttcttgctgatcggttatttcttggaaatcaaaggtgacttattacaagtcctaccattattcatgattgccaacatcattggggtcatttcgatggtgcctggtgggttagggacgtttgatttattcatgatctttgggttgagtgcaattggcgttggtaatgctgatgcagttgtttggttatcattctaccgggtattctactacatcatgccattcttggtgggggttggcttatttacccacgatgcgggtagtcgcttaaatcactaccttcaaggcctaccacggcagattatgcaaaaaatcgcgcaccactttatcgtctttttcctctatatttcggggattattttactattagtagcgactgtgccaaactttgcgattaccaataccgtgatcggtcaactttatccttacacgttctttttcctagaccgggtgacgaatattatcgtggcctttgtcatgctagggttagcacgcggggttgctaaccgggtaaaacgggtttattggccattgatgattttattggtgattgcgattgccaataccctatggcgtgacttctcgattaagttggctgttttcttgatccttgtcttattagctagcctcttattgaaacgggaactttatcgtgaaaagattgaattctcatggaatgatcgaatcgtcgatggcgccatttttgtcggcgtcttcttgctatatagttttgtcggaatcgcgaactcaccacacttgcatcaccgtaaaccagtaccaacggcgttattattcccgtcggaacgaatttggcttgtcgggtttgttggcttgttagtggcagcggcaacgttgttcatcgttttccgctatctaagtcgtggtgggcataagatcgcaacaccatttgatgaagcgcgaattagcaaggtgattgcggaatacggcggcaatgaagttagtcatttggcttatctaaaagacaaatcagtttacttctatcaagaagatggcgaagatcaagtcttcttgttattccgaaaaaaagcggatcgcttgattgtgatgggcgaaccagtcggaaatccagacaagtttatagatgcgattgaagcattgatgcgcgaagccgatttgattgattgtcatttggcgttctatgaaatctcggctgagttaacgatgcaattacatgaaattgggtttgatttcatcaagtttggtgaagaagggtacgtgaagttggctgactttacgttagttggtaagaagcgccgtgctgagcgggccttgatgaataaatttgaacgtgaaggttatcaatttgaattattgacgccaccattttcagatgacttaatggctgaattgaaggccgtttcggatgattggcttgatgggcgggttgaaaaaggcttttcactgggcttcttcgatcctaattatttacaacaggcagccatcgctgtgatttatgatccagagcatcggattgtggcttttgccaatgatatgccaactgggacgaaagaagtttcaagtattgacctcatgcgccacagaaaagacgcgccatctggtataatggatgaagttttcattagtctttttgaacacaacaaagcagaaggttatgagtacttcaatttagggatggcgccactggccaatgtggggacgtcagaattcagttttattgaagaaaaaatcgcgcatttgatttatgaatatggctatcacttctacggcttccaaggcttacggacgtataagaagaaatatacgacgaagtggattcctaaatacattgcttatcaaaagcggacctcaattatctttacgatgctccaaattctattagtagtgaaccaaaaagtgacggagacaccacaacgaaaaggactcgcaggtcattttatgcgttttgttcaaatcggcaacttaactaacaatcaagacaaatgaggttcttaaatgacagattattattattcaaaaaatccggaagttgaacacgctgagaaaaattggacgtttgaactacggggctttaatttcaagttcacgactgacaatggtgtgttttccaaaaatactgtggattacggttcacgggcattactagatgccgttgatttaagcgagacgccagcaggtcccatcttagacatgggttgcggttacgggccaattgggatgacacttgctaaactagcacctgagcgtcaaatcgacatggtcgatgttaatgaacgcgcacttggtttagcacaaaaaaactgcgatttgaatcaaatccaaaatgttgcaatctttgaatcagctgaatatcaaaatgtgacggcgcaatacgctgcgattttgacgaacccaccaattcgagctggcaaaacagttgttcaaaatattttgaagggtgcctacgatcacttgttaccagatggtgaattagacgtcgtgattcaaaagaagcaaggcgcaccttcagctaagcaattaatggcggatacttttggtaatgtacaaatcattcataaggataaaggctactatattttacaaagtattaagttaaaataatgttgagccgataagacgtcaaacaggctgggatatgctaaaatagggctatagtgtaaggaggttgatacaatgaaaatgagatataagattctaattggtgttggtgtcacagcgggggtcggtgcaacagccactttcgttggttctaaggcaatcatcgagaaagttgaacgctaccgtaaacgtttggcagttaaaaactttgtcaaagataaactacatggtaatcaaaaggcattggaattggttgatcaactttccgatgcagacgtgaataatttattaggggcggctgataagctcaaccaattaaaggataagctaggcgaacaaaccgataatattccagaaatgatggaagacttacggcaaacgttgacggcttatgcgacgaaagtcaaagaacggctataaaaaacgactaagagtgtttctaggacaaagatgtcttttgttttagggacactcttttgattggtaaaggggttagtgaattgggatatacacaaactgagattgatcagtggatgcaagttgcaattgatgaagcgaatcaggcacggattattggtgaagtaccgattggggcggttatcgtgaaggacggccagattattggtcgggggcacaacattcgcgaacacgcacaggatgcaacgttacatgcggagatcatcgcgattcaagaagcttgcatggttgaaaagagttggcgcttagaagacacggcgatttttgtaacgttagaaccgtgtccaatgtgtgccggggcgattactaacagtcgaattccaaatgtttattttggcgctagcgacccaaaagccggtgtgactggcaccttgatgaatcttttgacggacaaacggtttaatcaccaagcgacagtggtggctggtgtgcgcgaagttgaatgtgccgccttattacagacttttttcaaaaaaattcgggaaaatcgtcgaaaaaagaagaaaaaaactggtaattttaaacctaatcaggtagaataagagttgccgtaaggccttgagacaatgatgagcctacgaatcgtgtcaggttcggaagaaagcagcactaagtttgttttatcatgtgtcttaagttttttagaaattaaccaggattaggtcaatatgacttaatccttttttagtgcctagtgtgtttcaggcggtcatattgtgtaggcttagcctcgtcacgtgaataagcgacgtggtcgattgtttgcgcggcgctgctaaccgtaacaatatgtctgaaaaagcacgttgattcagaagatgcagggagactgaagctaaaattatttttggagcagtctcttttttagtgcctttaggccctaaaaaatactgtaaaatatgctaaaatggaacaagtagtttttttaaataataggacgattaggtgaaaggcggaggtcattaaatgagctatcaagctttatatcgggtttggcggccacaacggttcgatgatgtcgttgggcaagaaacaatgacccaaacattaaaaaacgccatcatcacaaaacagacgagtcatgcctatttatttacggggccgcgggggactgggaaaacgtccgctgcgaagatttttgccaaggcgattaattgtcattatcaaaaagatggcgaaccttgtaatgaatgtgaaacgtgtcgggcaattactgccggtgcgttaaatgatgtgattgaaattgatgcggcttcaaataacggggttgaagaaattcgggatatccgggataaagcgaagtatgccccaacccaagccgattataaaatttatattattgatgaagtccacatgttatccaccggtgcgtttaatgcgctgttgaaaacattggaagaaccaccagccaacgtggtcttcattttagcaacgaccgaagttcacaaggtgccagcgacgattatttcgcggacccaacgctttaacttcaagcggattacggctgctgatttattcaaacggatggcttacatcttggaacaaaaagaaatgacttacgatccagctgcgttaaaagtgatcgctaaagctgctgaaggtgggatgcgagatgcactgagtatcttggatcaggtcttatcctttagtgataatcacgtcactttagaaaacgcgttggatgtgacggggagtttgacggaagctttactagccgattacgtacaaacaattcacgatcacgcgcctaaagcagcgttgcaactattgcaacagatattagctgagggtaaagatgcccaacgctttgttgaagatttaatcgaatatgtacgtgatttattgatgtatcaacaagcacctgaattggtaatggctaatgaaatggatttattggacgaacacttcaaacaacttagtgatgccttgagcgccgaacaattgtatacggtgatcgatattttaaatgaaacgcaacaacaactacggttcactaatcatccagaaatctatttggaagttgcaacggtgcgtttgacgcaacaaccagtggcacctgcggccgttagcgccaatgtttcagacccagccgataatgagcaagtgacccaattaagtcaacaagttgctcaattacaagctgccttacagaaattagaaacggccggaccaagtgcgcctgttcaacaagcaaaacctaaaccagctaagaaaattagtaagaaggtcaaccgcaagttgatttatccggtacttgcggatgctactcggactaatttagaaaacttaaaagaagtttggccagatttattaaatatgttagatgttaccaaacgagcgattatgcgggtttctgaaccggtagcagcgagtcaaagtggcgtcgttgtcgcttttaactacgaaattttattcgaacgggctaataacgatcaggatttattgacggtcctagaaaacggcttaaaccggttaacgggcaatccgtttaaagtggtcttagtaccgcaagataattggccagaaatccggaaagaatatttgcaaaatcatgcggtttcaggtcataataatgaggaccaaccaacgacgactaccgaaaaagcaccggcgcctgaagttagcgaagttgtgcagcaggcccaagcgttattcggggatgcagtcgttgttcaaaaagattaatttaaaaattgagaggatgttttaaaatgcgcggaatgggtaatatgcaaggtatgatgaaacaaatgcaaaaaatgcaaaaagaaatgggtcaaacacaagacgaattaaacagcactgaattcgttggtaaggctgctaacgatgctgttgttgtgaccatgactggtgacaagaagatgaaagatatcgccatcaaaccagaagctgttgatccagatgacattgatatgcttcaagatttaatcatcatggcagttaacgaagcaatggttgatatcgataaacaaacacaagctaaaatgggcaagttcacaaagggcctcccattctaaggtaaccgaataaggaagtgcacatatgcaatatccagaaccaattgcgaagttgatcgaaagttatatgaagttaccaggcattggtaacaaaacagcaacgcgattagctttttatacgattgatatgaatgaagatgacgtgactaactttgccaagaatctgatttcagcacgccgagacctccattattgtagtgtctgtggcaatatcactgatgaagatccttgtgagatttgtcgggataccgcgcgtagtcaggaaatgattttggtggtcgaacaacctaaagatgtgatgtcgatggaacggatgaacgattatcacggtctctatcacgtcttgcacggggtgttgtcaccaattgaaggtaaagggccagacgatattaatattgctaatttaattaaacgactccaaaaaacaccagctaaagaagtcatcatcgccaccaatgcaacgccagaaggggaagcaacggcgatgtatatttcacggctaattaagccagccgggattaaagtcactcgcttagcccatggtttagcggtcgggagcgatattgaatatgcggatgagatgactttattaaaagctgtcgagggtcgtcaagaaatctagaaatggtggggttataatgttcggtagacgaaaaccaacgctaagagaagctggcgatgaagcgttacttgatttgatttatcaagtgaaagataagtggcgctcagcacaaaaaacgcaagcaaacgttagaggactagatcaaacgttggagatggaaagtaagattcaacaagcaaagttcgaatttttataccgacaagcacgtcagcgcaaggtggccagtgatgccgtttcgcgtgaagtagccagccgtaatgctttaagataaccaaaaaaagattggacccttgataaaagtgattttatcgggggaccaatctttttattagcgaacttttaaccccttccctttaccttgtttgctcaatcaagtaaaataagagtaactctattgatgaagaaggttgttgtgtggtaggcaaattaattacgtttgaaggaccagatggtgccggtaagaccagtgcactcgaagcagtcgtggcacgcttacaaaaagaagtgtcccaagaaattgtcgtgacacgtgaaccaggtggcaatccaatctctgaacagattcgccagattatcctggatgtgaagaatacggcgatggatgatcgaacagaagcattattatacgcagcagctagaagacaacatattgttgaaaagattcaaccggcacttgcaaccgataaactcgtgatctgtgatcggtttgtggatagttcaattgcttatcaaggtgctgggcgcgggattggggaagaggcagtggcgcaaatgaatttatttgctactgacggcctcacgccagatttaacgttatacttagatgtgccttctgaagtcgggttagcccggattaagcagcatcgtcaaaatcaatatgaccgcttggatcaggaaaaattagcattccatcaaaaagtgcgtcaatcttatttgaaactagcacaggcgcacccagatcggattaaaacaattgatgcctcacaaccccttgaagcggttgtgacacaatgtttacaagtcatcgcacaagcaaatccgcatttatttgaagtataaggggagagattaagatgaaattattattagcaatcgtccaagacaaagacagtaacttattaagtagtgaattaattgatgccaacattcgagcaacgaagttatcaacaactgggggctttttgaaatctggcaatacaacgtttatcgtggggattgaagacgaacgggtcccagaagcattgaagattattgaagaaacgtgccaagcacgcgaacaattcatgacacctcctatcaatatggatgccacaatggacagttcaatgtcttaccctattgaagtacaagtcggtggggcaaccgtctttgtgatgccaatcgaacaattccaccgcttctaaacaatggccactttaacaattgaacaaatgcaacccaagcttgtccagcagtttgcccagattattgcgcgtgggcagttagcacatggttatttattagccggtgcacaaggtgtgggtaagatgcaattggcacaatggttagcactgcgtcttttttgccaacaggtcaatgaagacagtcaaccttgctatcaatgtcctgaatgccagcggattttaactgggaatcatcccgatgtcgtcgaaattaaaccagacggtaagagcattaaaattgctgatattcgctatttgaagcaagaagttgctaagagtgggatggaatcgagtcagcggcttttcattattgaagcggcagagacattgacggctagtgcggccaacagtttattgaaatttttggaagaaccggcgccaaacgtctacgcaattttatgtaccagcaataagaatctgatgttaccgacgattttatcgcggcttcaagtgattgacttagccaatctgccgaaggaaatggtgcgtcaacaatttgaagaagcgcagattttaccagcgcaggcacagctgttgagtcacttgacgagtgacttaacgcaggcccaacaattattggccgaagactggctgatgcaagtcgttgctaaaatcacgagttgggcccaaaaagttgcccaaaaggatttggagagttttgtaacgattcaaacgcaactactaccgttattgacagatcggtcccaacaaaagatcgccttaaacttaattggtttgtggtatcaagatcttttaaactgccggtatgatttggcgggtgatctttgttttagtgagtatcgcacacagttaaacaccattagtcaacaaatgaccgcagcggagattgtggcgcaaacagaattcgttttaacggcccaacgcacgtttgaacaaaatgtgagttgccaaaacgtcttagagagtttaacgttaaatttaatcgcagtagcatagcggatcgtagttcaaaaattagcttaaaaggccatcgggaggatgtaaacgttgagtaaaacagacttatacgaacaattattaactattgagcagcaggccaagttaacgtttgacggcatcactgaaatgaaggcagttttatctaaagttctggaagaaaatgcagaattagagattgaaaataaacacctcagagaacaccttcaggaattacaacaaacaactgaggaaactgacaccaaagatttatcgcaaggtttgtctaagtctaaacaaaatttacagaatctgtatgaagaaggctttcatatctgtccttatttctatggctcgcgacgtgaaaacgacgaaccatgcgccttttgtaacgacgttatttatggcgaacggacagctgattaatcattaagcaacgcaaacagggcgctgaggcaagattatttgtcgcggcgcccgcttttataagctcgagtcattacggcgtgaagggataattaaacatgcaaacacaatctagttttaaaacaaccactcaaggggtgctctatttggtgccaacaccaatcggcaacttgggtgatatgacttaccgcgcaattgagacgttaaaaaacgttcagttaattgcggctgaagatacacgcaatacgcaaaaattattgaaccactttgaaattgaaaccaaacaaattagtttccacgaacataatacgcaacaacggattgaaacgttgattgaaaaattggaagcaggcgacgatattgcccaagttagtgatgcggggatgccatcgattagcgatccgggtcatgaattggtcaaagcttgtatcgaagccaatatcgcagtcgtaccactaccaggcgcaaatgctgggattacggcgttaattgcttccgggattacaccgcaaccctttacgttctttggctttttaccacgtaaaggtaaagaattaacggaaacggtcgcgcaattagccttaaagccggaaacaaccatcttttacgaagcgcctcatcgtttaaaaaagacgttacaagcgttgattaacggttttggtggcgagcgccaagtgactttaggccgagaattgacgaagaagtttgaagaatttattcgcggtgatttacaagaagccttaacttgggcaactgataatgaaatgcgcggtgaatttgtgattatcatagcgggcaacccaacacctcaaaacctaagtgtggtggacaccaatccgactttatcactatcagaacaagtcgaagcccagattcaacaaggggctagtcctaatgttgccattaaaacggtcgctaaggccaatgacttgaagaaacaggtggtctacaacgcgtaccacgatttaacagaatagaggaaataagatggcaggcaagcagtatacagaggaataccggattccgtattttgaaacggatattaaaggcgaattgactttggcatcattggtcaacgttttaattttggcctcagaacaccaactcaatgacctcaacgtcggcgaagaaaccatgcatagtttaaaccttggttgggttgtcacgcaatatcaaatgacgattaaccggatgcccaaagtggatgaaaaggtgcggattgtgacggaagcagagagttataatcgctatttctgttatcggaatttttggttgtatgatgaagcgggcaacgagtgcgtctttgtccagagtatttttgtgatgatgtcttatgaaacgcgcagtatggtgcccgttgtccccgaaatcatggcaccgtttgaatcaatggcaatcaaaggtagcaaacgattcccacgtattaagaagatagactcagaaaaggcatcgcaaaaagaataccgcgtgcgttattttgatattgatggcaatcaacacgtcaataacgtccattattttgaatggatgttagacgccttggattatgatttcttgatggatcatcgggtgacaagtgttaatatccgttatggtcatgaaattcaatacggccaaatgacacaaagccaggtcgaacaagtgatggtggatgacataatgacgacacgccacaaggtagccgtggatgacctcagcgcagcagaagccgaaatagcatggactaaaagataagcgtattgctaaaagtacgtttcagatacaaaaaaagggagctgggacaaaagtaattttgtcccagcccccttttttgttatccaaatattgatggtctaaacgtgttctataagtcatatccttccggttaaccctgaatctcaagcgattgcttgcagcaatcattcgccattctgtgttaatcctcgggatatacccgacttatgatacacactcttttttaaacgtgttctataagtcatatccttccggttaaccttgaatgtcaaacgattgcttacagcaatcattcgccattctgtgttaatcctcgggatatcccgacttatggcacactccttttttagttagttttcttatgaaacggcattgctgacgaagttcacgaggtcagcgcctgttttaccagcacttaagccaacttgaagtttcaagcgggctttgggaccgtttaagccctggcagaaagtaatgcccatttttttcaatttaacgccaccaccatcgtagtcgtagacgtcttcggcaataccgttgaaacagcgtgatacgagcacaacgggaatattgcggtccagtaaggcttggatggcaggtagtgttgcgggtggtaaattcccagcaccaagagcttcgatcacaaggcctttagtagttggctgattgatggcttcaaaaagcgtcccgtccatgccggcataagcttttaataagaagaccggttcaaccaattcttggatatcgcagatttcagaacgaattaattcttggaagaaattagcatcgtgcttgctgaccaaaccaattgggccaaaagttggtgttctaaaagtagcgacatttgtcgtgtgcgtttttgtcacataacgagcggtgtggatttcatcgttcatgacgactaaaacacccttatcgtgggcatcgtcagaagcggcggtccaaacggcactaattaagttatgaagaccatctgagccgatttcattagaagaacgcatcgcaccggtgataacaattggcacgttgttaggcaaggtcaggtctaagaagtaggcagtttcttcaagtgtatcggtcccgtgagtgatgacgaccccatcgataccagttgcttcagctgcttgaatgcgattcttgagtgctaacatcacggttggtgtaatgtgtggtgagggcagattcgcaaattcttcactaataattgtgagttggttatcgaataatttttcaaaaccggccattggattttgaccagttggtgcgactgcaccgtcttgatcagcggacatggcgattgtaccgccagtgtgcaagacgaggatttttttcatagttgtcagtccctttcataatcaagcttaattagttccagtatagcaaattttaaccacattgagatgatatattttgaagtggacaaactgaatagttgtatcctcagggaatcggtggtacatttagtaagttctaaaaagattcggagtagggattaaagcgttaagtgctggtggaacggaatgtgaacaccagacgaagagcagtaatgctcgcggttttagtcccgcattcgccgcagtgttatttgtggcaactccaaaagggagatgctttttttatggttaatcaagatcggttatttggtgtgaagctagacaccagacgcgttgtattactagctgttctaatcgctttacaattagtgattgcgcgctttgcgatttcgctaacgatttacagaattagttttggttttatcgtcaccgctttaatgggctggtggtttgggccagtttgggcgggcttagcggccgtccttggcgatctcatcaatagtttgatgattggtgtcccgggcggctatttccccggtttcacgttatcagccttcttaggcgcattcatttacggctgtttcttctaccggcaaaagattacgtggttacgcgtgattttagcggtattaacggtggttgtcgtcgttaatcttggcctaaattcatggtgggtatcgattttaagtcagaccccaatcagtgtccactttgctacaagagcagtgggcgaggccgccacaatggtcattcatccgattgtgatttacctcgtgatgcattttgaaccaattgttcgtttgaaagacagaattcaataattttaaaaacaacgaccactttgataaagttattctttatcaaggtggttttttagtgcagctaaaagtgacgcgtgtcgatttaatcgctaatttatgctagaataacaaggattataagcagaagaaggatgacattaatgaagctattggcaatggatacctcgaatcaagcggtgagtgtggcgctacttgaagaccaacaaatattaggcgaaatgaccgtcaatattcggcaaacccacagtcaaacattgttaccaatgattgatcaacttttaaaacaaactaagacatcgattgaagcaatcgaccggtttgtagtcgcacaagggcccggttcatatactggcttgcggattgcggtcacaacggccaagtcttttgcctggacaatggccaaggaattagtcgggatttccagtttggcgctcttagcggggaacgttcaagaaacaaccgctttgattgtgccgctatttgatgcgcgccgggacaacgtttttgccggtgtttatcaatggcaagaccagcacttacaaaacgtggttgctgatcaatatttggcactaaccgacttattagcacaagtggcgttattaaatgaacctgtctattttgttggcggtgacgtacaacagtttaacgcacagattaaagccactttgggtagtcaggcccattttgtcgatgccaaccataacttgccacacgcagctgttctaggccaattgggggctaatgctgaaccagttgctgacatccatggctttgggccacattatctcagaaagacagaagcagaggtcaactggggtaagacacatgacgatcaaggatcggcagcttatgtggaacaagtttagggaatacctacgcccacgtgtttggttaaaaaaagagctcccctacgttacgcggcaagtcatgattgatgatcagccgttttacttggcgcgtgctagccagagcgatattccagcgttgattgatattgaacgctcggtctatggcggtaaaacaccctgggatcggtgggcctttgctagtgaactcagcaagcgccggacatcgatttatttagtattgtgccaaggctcagaagtggtcgcgtttgttggcgcctggttttcgactaatgaggcccacatcacgaatattgcggtccgtcccagctttcaaaaaagggggattggccactttttagtccacgaagtggttgcacttgcgcgggattatccaagccaaaaaattacccttgaggtccgcactggtaacaccggcgcccaatctgtttatcgacgaatggggtttaaggttgttaaaaccagacgtaattattatgttcaggaaaaagaagatgcattcagtatgtgccgcatactgagtcaataggagtaacaaaatgacggagaaaaaagaattaattttagcctttgaatcaagttgtgatgaaacgagtgtggcggtcattgaaaatggccaacgcatcttaagtaatgtcatcgcaacgcagattaagagtcaccaacgttttggcggggtagtcccagaagtcgctagtcgccatcatgttgaacaaatcacactttgtacacaagaagcactggaacaagctggtgtgacttatgatgatttaacagcggtcgccgtcacttacggtcctggactagtcggtgctttgttgattggggtcacagcggccaaagcaatcgcctacgcacatcatttgccacttgtaccggttaatcatatggccgggcacatttatgcggcccgctttgttaaaccgttagaataccctttgttagccctattggtttcaggtggtcacacagaattagtttatatgcccgctgcgggtcaattcgaaatcatcggtgatacacgggatgatgcggctggcgaagcctacgataagattgggcgggtattgggtgtgccatatccagctggtaaggaaattgaccgcctcgcacatttaggccaagatacgtttaattttccacgcgcaatgttgaaagaagataacttggatttcagtttcagtggtctcaagagtgcttttatcaatacggtccaccatgctgatcaaattggtgaaacattggatcaagcggacttagcggcgagcttccaaacaagtgttgttgaagtattagtcactaaaacccttcgtgcagcacaatcactaaaggttaaacaattggttgttgccggcggggttgcggccaaccaaggcttgcgagaaggcttagcggctgggattgaatcagcaggattagatcttgatttaatcatgccaccactacgcttatgtggcgataacggcgcgatgattggcgctgctgcccacattgcacttgcgcaaaatacgctggccgatttagatttaaacgccgtccctagtttggactttccatatcaaaacgaactttaaaagtaaaaaagagagtgtgctataagtcgggtatgtcctgaggattaacacagaatggcgaatgattgctgcaagcaatcatttgagattcagagttaaccggagggatatgacttatagaacacgtttaaaaaagagagtgtgccataagttgggtatgttctgaggattaacacagaatggcgaatgattgctgtaagcaatcgtttgagattcagggttaaccggaaggatatgacttatagaacacgtttagaccatcaatatttggataacaaaaaagggggctgggacaaaatttacttttgtctcagccccccttttgtcaggcttcactttgatgtagtcgcgcaccttggctttggtgctgctcacggcgtgcttgatgatgttgacggtatttttctaagcctaagacgatgccagtagcaataataccaacccaaaagagattaggcggtaagaataaaataaccataatcaatccagctaccagtggggcttcaagaatggcactgcccatactgatggcaattaacccaatgacaaagagggaatcaacttgcggaaataactggctgattgccatcccttgagcggttgaagcaaacaataccgggaagatatccccaccaagccaaccggtgttcaaacagattgttaataaaattagttttaatagggagcggctcattaaaaaaagcattgattgatcttgccaaatcgtggtgaataaatgaaagttatgttgaccggaaaagagaatgtgtggaaaaaagaggctggctaagaaaatcgccagaccaccgattaagacgcggacctgatcgttggtgaggcgggcttgcataattttgcgtaagcccaccatgccggccaaccaaagttttccgagtaaataacctccgagcactaatggtaaaaaccaatagagatcgcgcccttgccagtgtgattggccaagccgaataattaatgacggttgaccagttaagatgaagacaccgctaagccatgcggtcccgtttaaaaaataagtgacaatgagtgctttcttttgataggttgctactttggtaagtgaggtggttggttgttgataatgcaatagatagcggtgcggtgtcgcgagtacttttaatctcgtgcctattgattgtacacataagtcatcaaaatgcgcggcgacgtagcgttgcttatcagcaagccaaatactatagaggaaggttgagctaaccaacgttgcttcagggcccagacttgttccactgactaaaataacagctggaatcagcatttgtaagaggacatagcgataattagcagtgcccgcttgtttgagatcagccttaatgacccccaaattttgtgggaggggcccaaaatagtgtcgtgaaataataatgactaggcccaccaccaccagcataatggcgtctaagaggccaccaaaggttgctttttgccagaaaatttcaattagggtactttgcaagctgtaaaaaaggccgagcaagataccgacgatggcgctcagaataaggccgtaactgaatagataaagtgatttaaatttaaacatgatacctccgaaaaaaagtgtctaaaagccatttaaccatagttgacaggaaaagtcaggttaaaaaaatcaatataaaataacactagttattagttaatttattaacaaatagtcagtaaaggggaatcagcaattatttaaattaaaaaataacattaattgacaattatttagaaagcgcttatactgaatttacagcagtgatgaaaacgcttcatttcactttctgtacaattttttcatttcaatctaaaaaaattaaggggtaattattatggcagaaaaaacaatcatgttatgttgtgcggcaggtatgtcaaccagcttgctcgtttcaaaaatgcaaaaggcagcagaagcacaaggtgtcgatgcagaaatcttcgcaactggcgcatcagatgcagataaccaattagaaaacaaaaaaattgattgcgtcttattaggccctcaagtacgctttatggaaggtcaatttaaagaaaaattggcacctaaaggcattggtgttgaagtgatcgatatgaaagcctacgggatgatggatggcgaaaccgtcttgaaacaagcgttagcactaatcggttaatgatttaaaacaaagcccacctaagtaattaggcgggctttttgattagggttagacaagtctgtataatcggagaaaagagtagaggaggagaagctaatgagtcttttaggcacaattatttggtggattttcggtggcttagtgagtgcagttggttggtttttagccggcttagtgtggtgtgtcacaatcgtggggattccagttggcttacaatgtttcaaaattggtggtctgacgttaatgccatttaatgcacgagttgtttcgagcggtggtgcgggctcctttttattaaatattgtctggtttatctttggaggcttcattttatgggctaaccatattttctggggcttgttattaacaattacaattgtcggcatcccatttgcccatcaacattttaaattagcaagcttatcattgagcccatttggcaaacaaattgttggctagaaaaagcgcgtatcgtaggatacgcgctttttctggtttttaattagtcaattcttcgagtgccatcgcttgttcttcccaatcagcttctgtttgggcaaggtctgcttgcactttttctaaatcttgttgtaattcctgcaagaccaatggtttagtgatgatatcggcttgcgtcattttttcttgaatggcagttgcttgttcttcgagtgttgccatttgttcttctaaagcagcgacttcccgttctaacttccgttgtgcccgttgtgtttccttgctggctttataattatcttgagcagtaacaggttgatcactgacttcaactggcacttcagcggcttgtgcgaaggcttcttcctcagcttttttagcgagatagtagtcgtaatcgcctaagtagcgcttgctgccagtggtggttgacagttcaatgatgccggttgccacttggttgataaaataccggtcatgggagatgaagaggacggtaccatcgaattcgcgtaaggcttgttctaaaacttccttactatcgatgtctaaatggttagtcggttcatccatgatcaagaaattatcatggttcatggctaatttagtcagtagtagtcgtgctttttcgccaccacttaattgtgagacgactttcaaaacatcgtcgccggtgaataagaagctacccaaaagcgtgcggatttctttttcaggggtggtgcgatgttcatcccataattcattaagaaccgttttgttagcgtggaggttgcgttgttcttggtcataataaccgatagaaacattgctaccaacacgttcgtgaccttttaagaatggaatttgatgaaggatactctttaaaagtgttgatttaccaatcccattagggccgataatcgctaagcgttcttgcttgttgacctcaaagttaatcggttcgaccattactttgtcggctgagtaaccaacagccgcgtcaacgacttgcaagacttcgttaccacttggttgatcgatatcaaaatggaagtggattttagacgcgtcgttggttgggcgttctaacttatccatcttttcaagttggcggcggcggctttgggcttgcttagtcgtgctggctcgaactaagtttttgtcgacgaatgtttggagcttctcgatttcggcttgttgtttttcataagccttccattcgagtgataggttggctgatttttgcgtcaagaagtgactgtaattgccggtgtagtgcgttaatgtgtggcgactcatatcgtaaacttctttagtaatcttgtctaagaagtagcggtcatgagaaacggttaaaagtgcaccgggataggtttgaagataattttcaagccatgttaaggtttgaatgtccaaatggttagttggttcatccaagattaagacgtcttttttctcaagtaatagcttagcaagtgctaagcgggaccgttcgccaccagatagcgtgctgattggtttggtgaaagtttcttctgggaattggaaaccgtgcaatacaccacgaatttcggcttcgtaaccatacccgtttgcttcagaaaagtcgtgttgaatctgatcgtattgttttaagagggcttggtagtcctcatctgaacgattagcatctggatcggcaattgcttgttctaacgtatgcatctgtgcttccatttggcgaaggccttcgaaaatcgttagcatttcgtcatagatgttccgttcagaactaagaccgctatcttgggctaagtagccaacgtggacatttttacccagaataatttgaccatcatcgggcgtcgtaatgccagcaatcatcttcaaaagtgttgatttaccagcaccgttagggccaactaaggcgacgcgggcgtgatcttgcacttccaattgtgcatttttaaataagtagtcaccgccaaagtgacgggcgacttgttgaacctgtaataatatcacaatgtaaaatcctttcgatgtcgtgtttttaaggtaccattttaaggaatcgttaaagtccgtttcaactatcataacagatttagggcaaagacagtcaaaatagtaaattaattgcttttcacaagaaaattcagtatcatttcaatatagtgtagggatattttcacaagtaaaagaatgaacggaggttccaaatggctgaaaataaaattccaagagccacagcgaagcgtttacctttatattatcgttatctaaactttttaaacaattcgggtaagaccaagatttcgtcaactgaactatctgaagctgttaaagtcgatagtgcgacaattcgccgtgatttttcatatttcggtgcgctcggtaaacggggttatggctatgatgttgagtctctcttgagtttcttcaagaagacgttgaatcaagaccgcttaacgaatgttgctttgatcggtatcggtaatttagggcatgctttgttaaattacaactttagacaaacgaataatattcggattagcgctgcttttgatgttaaacctgaattaattggcacaatccaaacaggtgtgccggtttactcaatggacgaaatggttgaacaattgaagttgcaacaaattgaaatcgtcatcttgacggtcccaatcgaagttgctcaaaaagtaacggatcaactagttgatgcagggattaagggcatcatgaactttaccccaattcgaatttctgtaccgaatacgattcggattcaaaatgttgatttagcgaaagagttacaaacgttaatttatttccttgataattataatacagaagaagcgtcaaaataaatagagcctcattaaccagcagtaatgtcggttgatgggctctatttttttaatgactgagataaaagagagtcacgacgagattcattcccgcatgactgataatcgttgtataaatggaacccgttttgcgatagagccaacaaaggaaaaggccgattgccgcgtagataattagatgactgtcttgatgaatcacggcaaataataaactagagatgagtgcggctaataccgaatttaagcggccactaagaccgccaaaaatcgcctttcgaaaaacgagttcttccatggttggcgcagcaatcgttagaataatgatcaaccacggttgggctttgagggccgtcatgagagtgagcgtattgagtgattgcgtactatttttaaagagtagatgatcaattgaaccagcgataatttggacgattaacgcgagtaaaataccactaatgccccagatgatggctttcttaagcggcaaggggtgtttctcaagtctatttttttggcctcgataattaaaatagagtaataaaagtgcgccgaggctgtccgtgattgtggtgaataaatagaattgatctgacaacccgaaaaagcggacgagggcactagggattaataaaatgatgagatagctgataatcagcctaaaattttgttggctttgagtcatgattacgctcctgaaagttgatgtgaccatagcgtagcgcattgactactaaaatgcaaaaggggatagcaaaatacttgcaatgttctgaaaaaatgctatgataaaaaatgtgattagcacttgagcgtttagagtgctaaaaaagaaaaagtgatggagggattttaagtgttaaaaccattagaagatcgcgtagtgatcgccgttaaagacgaagcagaacaaacagtaggtggcattgtcattgcaagtaacgccaaacaaaaaccacaaactggtaaagtcgttgccgttggtgccggcgcaatgaccagtgacggtcagcgaatcccacttgatgtcaaagaaaatgatgaagtcatttacgataaatatgctggttcagaagttgaatacgaaggccaacaatatttggtattacacgcaaaagacattatcgccattattgaataataaactgaaacgtttaaaaacaaactaaaaaatttttttgaggtgaaataactatggcaaaagaacttaaattttcagaagacgcacgttcaaaaatgttagcaggtgttgatcaattagctaacactgttaagacaacattaggaccaaaaggccgcaacgttgttttggaaaaagcttacggttcaccagaaatcactaacgatggtgtgacaatcgctaaagcaatcgaattagaagatcattttgaaaatatgggtgccaaattagtttctgaagttgcttcaaaaacgaacgacatcgccggtgacggtacaacaaccgctactgttttagcccaagcaattattcgcgaagggatgaagaatgtgacagccggtgctaacccagttggtatccgtcgtgggattgaattagccactaaagaagctgttaagaagttacacgaaatttcacacaaagttgaaagcaaagatgcgattgcccaagttgctgctgtttcatcagctaacgaagaaacgggtcgtttaattgctgatgctatggaaaaagtgggtaacgacggtgtcatcacagttgaagaatcaaaagggattgatactgaattaagcgttgttgaagggatgcaatttgatcgtggttacttgtcacaatacatggtgactgacaacgacaagatggaagctgacttagacaacccatacattttgattacagataagaagatttcaaatattcaagatgttttaccacttctacaatcaatcgtgcaagaaggtaaagccttattaatcattgctgatgatgttgatggcgaagcattaccaacacttgtcttgaacaagattcgtgggacattcaacgtggttgctgttaaggcccctggttttggtgatcgtcgtaaggaacaattagaagacatcgcgacattaacaggtgccacagtgattacaagtgaccttggtctagaattgaaagaaacaacaatcgatcaattagggacagctggtaaggtaactgttacaaaagacgatacaacaatcgttgaaggtgctggtagcaaatcagctatcgcagaacgtgttgaaaacatcaagaaacaaattgctgaaacaacatcagactttgatcgtgaaaaattacaagaacgcttagctaaattagctggtggtgttgcagtgatcaaggttggtgctgccacagaaacagaattgaaagaacaaaaatatcggattgaagatgccttaaatgcaacgcgtgcagctgttgaagaaggctacgttgccggtggtgggacagcattaatcgatgtcatcgaaagtgttgccgctcttgaagaagaaggcgacgttcaaacagggattaacattgtgcttcgtgcattagaagaacctgttcgtcaaatcgcaacaaacgctggtcttgaaggctcagtcattgttgaaaaagtaaaatcacaacctgttgaagttggctacaatgcagcaaacggcaactgggaaaatatgattgaagcgggtatcttagatccaactaaggtaacacgctcagcattacaaaacgcagctagtgttgctgctctaatgttaacaaccgaagcagtggttgctgacaaaccagaagacaacccagcaccagcagcaggcatggacccatcagcaatgggcggcatgatgtaataaaagaagtgtgactcgagttggtcaggctttgaggattaacagtaaaacgggcattatggcggtccttgccatgatgtccgttttgtagttaaccggaaaaggctactcgaggagcacgttaataaaagaagtgcgtttgaaacgggttgattctgagcattaacctaaaaatgagcgttatggcgggtcttgccataacgctcattttgtagttaggcgcaggaatcagtttcaaaaagcacgttaaagaaagaagtgtgtttggttgcgggtagcaactgagcattaatacaaaattggcagtaatcttgggcttaggattactgccaattttagattaagcggaggttgttgcaaccaaaaaacacgttaaagcagtacgtccaaccaaggccatccccagcattttactggggatggccttttttgctgtcgttttcaaaattaacgctggttattatcgttttttagcttataatgaatgcaaggcgcccgtcgaaatagattttatttagctaatcgacgctataactaacggtcaatgatggttagaatagataggtacctaagttaaattcttgtagtattttagtgtcagatatagtagaataccttttgttcgaaaaaacagcaattatttttaagtaggatattatattcaaaagtcaccgtgtgaaatggtaacaggcgattatcacatgagggctttttatgtatagaaatacgattaattaaaggagttatattgcaatgcaacaactaaaacggattttcatcgggaaaccattaaagtcttccgatgaaggtaaccagaaattagggcgcttcaaggccctggcaatgttgtcttctgatgctttgtcatcagttgcatacgggaccgaagaaatcgttgttgttttaacaacgctttctgcagcagcaatttggtattcaattccaattgcagcattcgtattggtgttattgatttctttaaccctttcttatcggcaagttatccacgcctatccaggtggtggtggcgcctatgtcgtttcaagtgaaaacttgggtaagaatgcgggtttagtcgcaggtggttcactgcttgtggattacatgttaacagttgcggttagtatttcggctggtgctgaggcgattacctcggcaattccggcaatgtacgggcatcaggtgggaatttcctttgtcatcgtgattattttaatggcgatgaacctccgtgggatgcgcgaatcggcgtcgttcttaatggtgccagtttacttattcgtcttgatgatgaccttgatgattatcgttggatgttacaaaattttcacaggtgcgattccattccacgcaacagcaacagttggggccgttgtaccagggatttcaatggcattgatctttagagctttctcatctggttcatcttcattaaccggggttgaagcaatcagtaatgcggtaccgttcttcaagaaaccacgggccacaaatgctgctgaaacattggcaatcatggccgctatcttagggttcttctttgccggcatcacattcttgaactactggtacggcattgtgccaatggaaaaagtaacggtcttatcacaagttgcacaacatacttttggtaaagggttcttcttctatatcgttcaattcgcaacggccttcattttagctgttgccgctaatactggtttctcagcattcccagtgttggcttataacttagcaaaagataaatatatgccacatatgtatatggatcgtggcgatcgtttgggttactcaaacgggattatcacattggcaatcggttcaatggcgttgatcttcatctttaacggtgacacatcacgtttgattccgttatacgccgttggggtgttcattccatttacgctttctcaatcagggatgttgcgtaagtggtgggttgaacggcctaagaattggtttggcaaatcaatcgctaactttgttggtgccttgatttcatttgccattttaattatcttattcgtttatcgtttacctgatatctggccattcttcatcatcatgccaattatgatctggattttctataagattcatgatcactataagaaggttgcacgtcaattacgagtaagtgccaacgaagctgtcttacatgattatgatggctcaaccgttattgtcttggtcagcaacgtgactcaagttacccgcggggcgcttgattacgcacaatcaatcggtgattacgtcattgcaatgcacgtgtcgacagatgaaaatccggaaaaagaacgtgaaattcaagctgaatttaaggctgatttcccgaacgtccgctttgtcgatgtgcattcatcataccgttcaattcaaaaaccaattgttcgttttgtggatattgttagcaagaatgcccaaaaacgaaacttcacgacaacggtcttggtaccacaatttgtgccaagaaaaccatggcaaaatattttgcataaccaatcaagtttacgcttaagaacagcttttgccagccgtgaaaacatcattatctcaacatacagttaccacttgaaacattagaagtgcttttggttgcggttagcaactgagcattaatacaaaaattccgttaatccagattttaggattaacggaatttttagattaagcggaagttggtgcgaccaaaaacacgttaaaaaagaagtgcttactcgagctggttaggatttgaggattaacgtaaaaaaggtcattatggtggtttataccataatgacctttttgtagttaaccggaaaaggctgctcgagaagcacgttaaagaaaaaagaagtgcgttcaagcttgaaaagcacgttaccaaaacttgatcttaactaaaatagttaaggtcaagtttttttgtttcattaagcaccggcaaaactttttattcatggtaaaaattgctacaatagaagctattaaagttagtacacaacattaaggggcgcgacatgcgaatattatttattggtgacacagttggcacaatgggacaaaaaatggtgaacgagtatttaccacttttgaaacaacaatataaaccacaggttaccattatcaatggcgaaaacatcgctgatggcaagggaatgacacaaaaggattacaagaacttattgcaagccggtgcggatgccattacgatgggcaatcatacttggaacaaacgggatattttggacttcattgatgatgccaaaaagttagtgcgaccagctaattttcctaaggggacaccaggacaaggcatgacgatgattaacgtcaatcaggctaaattagccgtcattaacctacaaggccgtgcattgatgggtgaattgttggaagatccatttgcaatgttagatgacatggtggcccaagtcagcaaggaaaccaattgtatttttgtcgattttcatgccgaaacaacgagtgaaaaattggccttagcttggtatttagatggtcggatttcagcgttagttgggacgcatacgcatgtgcaaacaaatgatgcacgtgttttaccagacggaacggcagtgttgacagacgccgggatgacaggtccttataacgggattcttggtgtgaaacgcgaaaaaatcatttcacggtttatgacgcaacgcccagaacgatttgaactagtgacagaaggtcctggccaattgaatggctgtttaattgaaattgatgatcaaacgggtcatgccaaatcaatcaaacccatccatatttcaccagatcatccattcggatcacgcttttagaagatagaaaggggcttgaaaatgctgcaaaaaacaaaagaaacgccaatgatggcccaatatcaaaaggttaaggatcaatatccagacgcctttttattttatagattgggtgatttttacgaattattcaatgatgatgctgttaaagcatcacaacttttagaattaacgctgacagcgcgtaataagaatgcagcagaccccattccgatgtgtggtgtgccccatcatgcagcgcaaaactacattgatattttagtggatcaaggttacaaggtcgccatttgtgagcagatggaagatcctaaaacggctaagggcatggtcaaacgcgaagttgtccaattagtaacacctgggaccgtgatggacgaaaaagccggtcacgctaaacaaaataattatttaacggcagtcgttgcacaaggcgatcaatttggctttgcctatacggatttatccacaggtgaaatgaaggttagccaaatcagtagtttagatgtgttattaaacgaaatgttgagtttacaaaccaaagaagtggttgtgaaccatgatgtcccaagcgaagtcgttcaagcctttgtccaacaacaaatcttggtttcttatcaagatgagggggccgatacggcagaggtcagttttgtttctcaaaatatctcacaaccactagcattagccgtcattaaacagttagttgtttatttagcaacgacgcaaaagcggcacttgggccatttacaacgcgcccaagcctatgaaccttctcaatacttgaagttggatcattcggctaagatgaacctcgaattaacggcttcattacgaactggccataagagtgggacgttattgtggctactggatgaaacaaagactgcgatgggtggtcgcttattaaaacaatggttggaacgaccattgttggatttaaaccagattaagaaccggcaaaaccaagtcgctagtttcttacagcactattttgaaaggacgaaccttcaagaagccctaaccaaggtttatgatttggaacgtctagcgggtcgcgttgcttttgggagcgttaatggtcgcgatttgattcaattaaaaacatccttagaacagattccaaagattaaagatgttttgacgggcattaacgaaacgcaggcttttgatcaagcgttaacgcgtttggatccagttgatgatgtgcggacgttaattgaaacagcgattaacccggattcaccgatttcagtgactgatggcgggattattcaagatggttacgacgaacaacttgatcaataccgcaatgcgatgtctaacggcaagcagtggttggcgcaattagaggcgcaagaacgagaagccacgggcattcataatttgaaaatcggctttaaccgcgtctttgggtattatatcgaagtcacgcgggctaacttgagttcattaccggaagggcggtatgaacgcaaacaaacgttaaccaacgccgaacgattcatcacaccggaactaaaagaaaaagaacaactgattttagaggcggaagaacgctcaaccgctttagaatacgaattgtttacccaagttcgggaacaagtgaagttacagattgaacggctccaaacattggctaaaggcgtagcggccctagatgtcttgcaaagttttgcggtcgtcagcgaaagctaccactatgtccaaccaacattaagaactgatagtcgcgaaattgatttagtcgatggccgtcatccggtggttgaaaaggtattgggacgccaaaaatatatccccaatgctgttcaaatgggcaaagaaacggatatgttattaattaccggacctaatatgtctggtaaaagtacctacatgcggcaattggccttaacggtcatcatggcgcaaatgggttgttttgtacctgccaagtcagcgaacttgcctgtatttgatcaaatttttacccgcattggcgcggcagatgatttgatttcaggacaaagtacgtttatggtagaaatgatggaagccaaccgtgcaattatgagtgcgaccgccaatagtttaattcttttcgatgaaattggtcggggaacggcaacttacgatggaatggccttggcacaagcgattatcgaatatatccatgatcacgtccacgccaagacgctcttttcaacgcattatcatgaattgacggctttagccgatacgttgaccgccctccgtaacgtgcatgttggtgcggttgaggaaaacggcgagttggtcttcttacacaagatgttggccggacctgcggataagtcttacgggattcatgtcgctaaactagcgggcatgccagaaaccttattacaacgggccgatgttattttaggtcagttagaagataaaccaaaagcaccggtgcaaccagaaatagtcgtaccagcacaaccgactgcagcggctgtcgaagaacagatggcgctttttgaaccagaagtggcggccccggtcgataagaaaacagataaagtggtagcggcaattaagaattttgatttgatgagcgccacaccactagaagccctcaatcaattatatgagtggcaaaagcaattaaataaacattaatagtgaactgagaggattagatgatggggaaaattcatgaactgtcggaaattctaagtaatcaaattgcggcgggggaagtgattgaacgccctgcctcagtggtcaaggaattggttgaaaacgcgattgatgccaatagtacgcaagtcgatattgttgttgaacaggccggtttacagatgattcaagtgatcgataatggtgacgggattgaaccagaagatgtgccagtcgcctttaagcggcatgccaccagtaagattgcgactcggcaagatttgttcaagattcaatcgctagggtttcggggtgaagcgttagctagtatcgcgtccgtttccgatttaacgattgaaacggcaactgcggactctctaggaacctttgctcattttaagggtggtctgttagaggaacaaaaaacaaatccgattcgaccggggacggcgattacggtgcgggatttattctttaatacaccggcacgattgaaatacgtgaagacttttcaaaccgaattggcgaatatcgtcgatatcgtcaatcggctagcaatgagccatccacagattgctttcacgctaaccaatgatgaccatctacttttaaaaacggccggcaacaatgatttaaaacaaacgattgctggtatttatggcgtcaccatggccaagaaactcttagccgtgagtgcttcggatttagattttaaactaacgggctacgtgtcattgccggaattaacgcgggcaacgcgcaattatttgtcgattttaattaatggtcggtttattaaaaattaccaattgaataaggccattatcaagggctacggttctaaattgatggtcggacgctatccaatcgccgtcttagcgattgagatggatccgctattgatcgatgtcaacgtgcatccaacaaaacaggaagtccgcttaagcaaagaaactgccttgatgaccttgattgaaggggcaatcaaagaaagactggcaaccgagaatttaattccagatgccatgcagaatttgaaacggaccaagacggtagatgttgatcagctccagatgaatttaaaccaaattacacaagaacgacggcacccaagcggtacggtgcgaccagtcagtccaatgccagccacaacggtcaaaccggtgacaccagaaattgcggaaaccgaaacgccgttagccgcaccaactgctaaagcgccggcgatgacaccggagcggcccttatttgagcaaccccaggcattggccgagtgggatcagaagtatgcgaccgaagcagttgggaagccatttggtgaccaagtggtagacgaaacggacgaaaacgatgaaaccgtagtcgaacccactgttcgttttccggagttacgctacattgggcaactgcacagtactttcttattagcggaaggcgaagatggcttttatatcttggatcaacacgctgcgcaagaacggattaagtacgagtattaccgagaaaaaattggggaagtcagcacctctgtgcaaaacttgttagtaccgcttgttttggaatatccgaatagtgatgcgctaaagattcaggaaaaaactgaactcttggcgtcagtcggaattcaattagaaaatttcgggcagaatagttttgtggtccacagtcacccaacttggattgaacagggacaagaggaaatgacgattcgtgggatgattgacgatgttttaaaagacggccgcattagtattgctcaattccgtgagaagacggcgattatgatgagctgtaagcaatcaatcaaggcacaccatcatttagatgatgcccaggccaaagcgcttttagccgatctagcgaagaccgagaatccgtttaattgtccccacggacgcccggttttgattcactacacgcaaaaagatttggaaaagatgtttaaacggattcaagaaccacatcatagttgggagggcgaataatgtttattttagcatcgcaatcaccgcgcagacaggcactattaaagcgcgttgtaaatgactttgaggtacaaccagcacagattgatgaacacgaaacaccgctaacgacaccgggcgattatgtccaaactttagcgcaacgcaagggtgaagcagtcgcggttcaatatccaacggcgaccattctagcggcggatacagcgattagttttcaagggacgctttatggcaaacccaaggatcgtcaagatgcctatgaaatgctgcgccagttaagtggtcagacacaccaagtttatactggattgtggctgatgaaagacggtctggtgcaacaaaaggttgtccaaaccgacgttacattttggcatttaagcaccgccgagattgaacagtatttagatcagaatgaatatgcggacaaagctggtgcctatgggattcaaggcgcgggtgcgctattaattaataagattaatggtgacttttacaacgtggttggcttaccagtcagcaccgttgcaagaatgttgcaggattaagaggaaataaaaatgatgaatgtggcagttttttgtggggccagcagtggccgtcgcccggtttatacacaggccgccagcgatttaggccattggttagtcaaacgacaagatcaattaatttatggtgggagtcgggttggcttgatgggtacgattgccgataccgttttagaaaacggtggtcgggtaatcggtgtgatgcctgaattcttaaatcaacgagaaccagcgcatgctggcttaagcgatttggtgatggttgacaatatggccgaacggaaatcaaaaatgattgaattagccgatgtcttcatcgctttacccggtggaccaggtacgttagaagaaatgagcgaagtgatttcgtgggcgcgaattggccagcaagatggcccctgcattttctacaacgtagcgggttattatgatttattacaacaattcttagcccacatggttgaagaaggctttttaacacaaggcgattttgaaaaatacttgtttaccgattctttaactgaaattgcgacgtttattgcgacttatcaaccaccaaaaatacgagaatattaatcattgggattaggaccgagtagggcgggactgatcccaattttggtgaacagatgagactaaaaatgacttgcataatgtccgaaacgtgcgattagtactagctttctgcgcttaacgacgaatgccaaataagcgattgaatcgcttattcgtcactctttgttaatgctcaaaagctaaacaagtactaatcgcactcttagccaaatcgctttgtatcacaccttaatttgaaacgtgttcttcaaaactggctgttgtgctttgcgccgcatcgcaaataatcgacggggtcgcttattcacgatactaagaaaatgctcgcagccaaatcgttttgaatcacactctgtatttatggtacaatttagcaagcaaatatatgttctcgtaaagtaggttagattatgtatgaatatttaaagggtttagtgacggcggttaatccgtattacgttgttttggaagtccaaggaattggctatcaattacaagttgccaacccatatcggtatacggaatcgatgagcgaagtggttcaaatttttgtccaccaagcggtacgcgatactgatattacgctttttggcttttacgacttagatgaaaaacaacttttccaaaaattaatcagtgtttccggaattggtcccaagagtgccttggcaattttggctaacagtgatcattctggcttaattcaggcgattatgaacgatgatattgggtacttaacgaagttcccaggcgttgggaagaagacggcccaacagattgccttagatcttaaaggtaagttaggtgatctagaacaaagcgcaacgttagtcggccaaacggcaattgatttaggcagccaaggcgattcacctgaattaagtgatgcactagcggccttgagtgcgcttggttattccgcacgggaagtcaaagcgattacgcctaagttaactgattttgcagcgcaaacaactgatcaatatctcagagaaggtttgcggttattgatgaagaaataaggaggactttaaatggcagatgagcgaattgtttcagccgaaaacgatgattttgctgaagcaagcattgaaaaaacattgcggccacaagtccttgcacaatatatcggtcaagatcgggttaaaaatgaattagcggtctatattgaagcggccaaaaaacgggaagagtccctcgatcacgttttactttatggcccaccaggtttggggaaaaccacgttagcgatggtgattgctaacgagttgcaagtccagattcgaacgacaagtggccccgcaatcgagcggcctggggatttagtggcgttattaaacgagttacaacccggggatgttttatttattgatgaaattcatcgcttacctaagatggttgaagaattactttattcagcgatggaagatttctacatcgatattgtggttggtcaagggcccaccgcacatcccgtccattttccattaccaccattcacattgattggcgcgacgacgcgggcgggcttattgtctgcgccattgcgagatcgtttcggaattgtggaacacatggcttactacacggaagctgatttgatggacattgtgcaacgctcagccggcgtctttaacatgtcgattgtgccagatggcgcgttagaaatcgcacgtcgctcgcgagggacgccgcggattgccaatcggttgttgaaacgaactcgagattacgcacaagtggctgaccaaaatacgattgatcaggcgattgctgatcacgcattaagtcagctgcaagttgatattcggggcttagacggtgtcgatcgcaaaatcctccagatgatgattgattattatcaaggcggaccagtcggtttaaaaaccattgccgccaatattggtgaagaaaacgaaacaattgaagaagtttacgagccttatttactgcaaattggctttttaaaacgaacgcaaagaggccggatggtaacgccggctggttatgcccatttaggcatgccttatccagaaaaatagaaagaggtaaccacatggtatccacagaagattttgattacaatttaccagaagaattaattgcacaaacaccaatgattgaaagagcagcatcacgtttattagtgatggatcacgaaactggtgctttagaagacaaggttttctacgatattattgacgaattaaaccctggcgatgcagttgtcatgaacaacacgcgtgttttaccagcacgtttatacggtgttaaacctgatactggtggtcatgaagaagtcttgttattaaacaatacgcatgacgatgaatgggaagttttaatgaagcctgctaaacgggctaaagtggggactgaagtggtctttggtgatggccaattaagagccattgtcactaaggaacttgaacatggcggtcggatgatcgaatttaaatacgacggcatcttcatgcaaattctagaagctttaggcgaaatgccattgccaccatacatcaaggaaaaattagatgatccagaaatgtatcaaacagtttatgctaaggaaccaggttcagccgctgcaccaacagccggtttccattggacagaagaacttttacaaaaggtgcaagataaaggcatcaaattggtttacttaacattgcacgttggtctagggactttccgccctgtttcagaagacaacgttgaagatcacaagatgcacagcgaattctatcgtttaacagaagaagctgctgcaacgttgaacgaagtcaaacaaaacggtggtcggattgtagcgactggaacaaccagcattcggacgttagaaacaatcgcaacgaagtttgatggcgaaatcaaagctgatagtggttggacagaaatcttcatcaaacctggttaccaatggaaagccgttgacgcttttatcacgaacttccatttaccaaaatcaaccttagtgatgttagtggcttcatttactggccgcgaaaacatcttaaatgcttatcaacatgctgttgatgaacgttatcgtttctttagctttggcgatgccatgtttgttaaataaattatgtaatcgaggtgtgagcattgatgtatttaagaaaagccgttttttctgatttaccacgaatttcagcaattatcgatggtgctaaagccgcgttaaaagaacggggtgttaaccagtggcaagctggcgatcctagtgaaagtcagtttgaaaatgatattcgccaagaatattgttatatcttaattaaggatgatacgattgttggtgtcgcatcaattgtcgatacagttgatgacggctacagtgcaattactaatggtgactggcaatcggttgcttctagtcatccctattattcaattcaccggatggccttagatggttcagttcgcggccaacatttggcccatcagcttatgacgttattaattacggccgccagtattgacggcgcgcacgatgttagaatcgatacgcatcccgataatttagccatgcaacacgtcattcaaaaggcgggctttacttactgtggcgatatcttgattgctgatgatccgtcacctaaacgctttgcttaccaactcgttttaaaataaagtttaaaattaaattgtccaaacgaaactaagatactcaggtatcttagtttttttatgtttttaaagtaagcgttatcaattgatgcgataggattctggttataaaacgtgaaattgctaacattaaaagtgtaagaatccccctgaaagcgattaccatcgcgactatagtaggtcttgtaaacaaaggaggtagttttaaatgacaagtccaattcatgtaaattccgaaatcggaaaacttaagacggtcttactaaaacggccaggtaaagaagtcgaaaacattacacctgacattatgtatcgtttattgtttgatgatattccttatttaccaacaatccaaaaagaacacgatcaatttgcacaaacattacgtgacaatggtgttgaagtgctttacttagaaaacctcgctgccgaagcaatcgatgctggtgacgttaaggaagctttccttgataagatgttgaatgaatcacacatcaaatcaccacaagttcaagcagccttaaaagactacttaattagtatggcaacgttagacatggttgaaaaaatcatggctggggttcggaccaacgaaatcgatattaaatcaaaggcattgattgacgttagtgctgatggtgactatccattctatatggatccaatgcctaacctatacttcacacgcgatcctgccgcatcaatgggggatggcttaacaattaataaaatgacttttgaagctcgccaaagagaatcaatgttcatggaagtcatcatgcaacatcatcctcgttttgccaaccaaggcgcacaagtttggcgcgaccgcgatcacattgaccgcatggaaggcggcgacgaattaatcttgagcgataaagtgcttgcaattgggatttcacaacggacttccgcacaatcaattgaagaacttgccaaggtattatttgctaaccacagtggctttgaaaaaatcttagcaattaagattccacataatcatgccatgatgcatttagacacagtcttcaccatgattgattatgataagttcaccattcatccaggcatccaaggtgctggcggcatggttgacacttatatcttagaaccaggcaataacgacgaaatcaagattacacatcaaacagatcttgaaaaagttctccgcgatgctttggaagtgcctgaattaaccttaatcccatgtggtggtggcgatgcagttgttgcccctcgtgaacaatggaatgacggttctaacacattagcaatcgcacctggcgttgttgtcacttatgatcgcaactatgtttcaaacgaaaacttacgtcaatgcggcattaaagtgatcgaagtcccatcaagtgaattatcacgcggtcgtgggggtccacgttgtatgagtatgccacttgtaagagaagacttaaaaaaataaacaataaaaaacgaggttgatcaacatgacaaacagcgtatttcaaggcagaagtttattagcagaaaaagattttactaaatcagaactcgaatacttaatcgatttctcattacatttgaaggatttaaagaaaaaagggattccacatcactatctagaaggtaagaacattgccttactatttgaaaaaaattcaaccagaacgcgtgctgcttttacaacagctgccattgacttaggggctcacccagaattcttaggtaaaaatgatattcaacttggtaaaaaagaatcagttgaagatacagccaaagtattaggaagcatgtttgatggcattgaattccgtggctttagccaaaaagtggttgaagacttagctaaatactcaggtgttcctgtatggaatggtttaactgacgaatggcatccaacacaaatgattgctgattttatgacagttaaagaaaacttcggcaagttaaaaggtgtgacattaacttatgttggtgatggccgtaacaacatggctaacagcttgttagtaacaggttcaatgttaggcgtaaatatccacatcgttgccccagattcattacaaccaacacaagaagtccgtgatttagctgaaggttacgctaaagaaacaggcagcaagaacatgattacttcagacgttgacgctggtgttaaaggctcagatgttttatacacagacgtttgggtttcaatgggtgaagaagataagtttgaagaacgggttaacttgttgaaaccataccaaatcaacatggacatggttaagaagaccggtaacgaaaacatgattatcatgcactgtttaccagctttccatgatattgaaactgaatatggtaagaagattgacgaacaattcggtattcaagaaatggaaattactgacgaagcattcagaagcaaatatgcccgtcaatttgaagaagctgaaaacagaatgcactcaatcaaagcaattatggcagcaacattaggcaacttattcatacctcaagcataactagattgtagaaaggggctggaaaacaaaactttgttttgtcccggctccttttttaattgaaaccacaattaattaacagaaagtaggacatgattatgacaaaacgtaaaatcgtcgttgcattaggtggcaatgccattttatcaaccgatgcctcagcaagcgctcaaatcaaagccgttaaggaaacggttaaacaattagttgcattcgtaaaacaaggcgaccaactcattatttcgcatggtaatgggcctcaagtcggtaacttgttgattcaacaagctgctagcgattctgaaaagacaccagcaatgccattagatacggtcggtgcgatgtcacaaggcgaaattggttactggatgcaaaatgcttttaacgaagttttagcagaagaaggcttggctttagatgttgccacaatcgtaactcaaacgattgttgatgctaaagatgaagctttccaaaacccaacgaaaccaatcggacctttctatagcgaagcagaagctaagaaacaacaaagtatcaacccagaagcacactttgttgaagatgccggacgtggctggcggcgagtagtcccttcaccacggccaattggtattcaagaagcacccgttattcaaaaattagttgaaggtaacgtgatcacgatttcagccggcggcggtggtgtgccagttgcgaaagaaggcaacaagctccgcggggttgaagccgtaatcgataaagatttcgcttcagaaaaattagcggaattagtgggtgcagacatgttaattattttaacagctgtggataacgtctacgttaacttcaataagccagatcaaaagaaattaaccaacgtctcagtcgctgaattagaagattacatcaaagacgatcaattcgctaaaggcagcatgttacctaagattcaagccgcaatcgaatacgttaataatcgtcctgatagtaaggccatcattacttcccttgataacgtgaagaatttattggcacatgatgccgggacaattattacgaaatagaggccaagctaatggaaattgcaaatttcggcgttgaagagtggttaaacgtgtacgaaacacaagcaactttggatatcgcgcaaagtacgattgcctcaatgaccatgtcagaattgatggccctctcgcctgataacgggacacaattttatcaagacttagcgcaacaaaagatgaattatggtgcgattgagggctcagaggcctttaagcaagctgttagtgaattgtatcaaacggtcaacagtaatcaggtgttgcaaactaacggggcgaccggtgccaatttattagcgctctatgccttagtgaaaccgggcgatcacgtgattaccatgtttccaacttatcaacaactctacgaaattcccatctcaattggggcaaccgtttcgtattggcagttggatgaggccaataattgggtaccagatattgctgaactgaaaaagttaattagaccagaaaccaaattgatttgtttgaacaatgctaataacccaactgggacggtcatttcgactgaactgatgcaagcaatcgttgaagtggcacgaacggtgggcgcatacgtccttgtggatgaagtttatttaccattaggtgaaggccaacaaacaacttcgattgctgatttatatgaattgggcattgcgaccaatagtttatcgaagacctattcagtccctggtattcgggttggttggcttgtcgctaacgaaacattaaccgatttgtttagaaaatatcgtgattacaccatgatttgtgccggtgttttcagtgatcagttagcggtttatgtattacagcatcgcaagcaggttttagcccgtaatcgggcgcttgttcaacgcaatcttgagatttttaaagcgtgggttgtacaagaaccactcgttgatgtggtctatccagaatcagtatcaacatcgtttattcatttcaaagagattgaagacgatgaagcattttgcaaatatttattaaaagaatacggcgtcttattagtgcccggcaagcgttttgaaattcccggacatgcaagattagggtattgtgcaccagaagcaactctgaaaaaagggttggccgaattatcaaaagcgctcagaacctattaataattgagtgacgtaatttaggagtggtttaaaatgacggaagaaaaaccagcaaaaaaaattggcttattggcattaattgcattggttattagttcatctattggtagtggggtcttcggattaacatctgatttagcgagtgcatccgcaccgggcccagtgttaatcgcatgggttattgttggctttgggattttaatgctggcattatccttgaataatttattgatgaaagaacctgaactagaagggattttctcttacgctgaaaagggctttggcccctttgccggcttcattagtggctggggttattggttgtcagcatggttggggaacgtagcttttgcgacaattttaatgagtgcgttgggttatttcttcccgatttttaaatcagggcagaacttaccctcaatcttagttgccagtgttttatcgtggagcttaacatattttgttaatcgcggggtagaaggcgcagctgcgatcaatacattggtaacaatttgtaaattgattccactatttgtcttcattatttttgggattgtgttatttaaaggtcatcttttcacacaagcattttggaataatatgagtagtagctttgttgctggcgatgtgatgagccaaatcaagaactgtatgatggttatgatgtgggtctttgtcggtattgaaggcgcttcaatgttatcggcgcgggcggaaaagaagtccgatgctggtaaagcaacgattttaggattagtgagtttactagccatttatatcttagcgtctgttttaccttatgggtatttaacgcaagatcaattagctagcatcaagcaaccagcgatgttatacatttttgaacagatggttgggacttggggtggctacttcatcggtgttgggttaattatctcgattttaggggcttggttatcttggacgatgttacctgccgaaacaatgttgttaatggcaaagcaaaatttattgccagcttacttcggtcgcgtcaacaagaaaaaagcaccgacgtttgcactagtcgtgacagcggggttgattcaagttttcctattcaccttattattcacaacgaaagcttataacttcgcttattcattatgtacggcttcaattatcgtttgttacatgttggtggcagcttatcaaattaaatattcttgggcccaccttcaagaaaaaggaaatcggcaacaattattaattggggttttagccttattatttgaaattgccggaatcttaatggcgggtgtcagttacttattactctgttttatagcctatattcctgggatttacttctatggtcgtgcccgtaaaaataatgggcaccaacatttcttatcaaaaggggaatggttaatcacgacaattattgtaattggtgcaattatcgggatttggttagttgtttcagggaaaatcgttatttagatatgttatattagaactttggttactttgagtaaaaagtaataattgagaatactttgggagcgaaaatcatgattgccgcagacgaatatccaagatatattcaatacttaaggaccagacctgaatttattgatttttcagatgaagaaatgaacattctgatgaataatatgaaagtcaaagattttcataagggccaggaattgtttgatcaaacagatgagcgcagccgattctatttcgttgtaagcggtctcgtaagagccgaacgaacggatgaaagtgatgaatttacgttctatacgtatatcaagcaaaacttagcttttccttatcgggggatgtttactgatcaatattatccatacaccgctcgggcgatgacggatattgagattatttatttcccaatggcgacttttgagcatcttttacaaaagaataccgattcaattgttaaagtcgttcaagaaatgggctcgattattagtgaatcagaagatcagatccagcgaatggtaacttctagtgcgaaacaacgggttattcaagccctaaaaatatttgaaattaacttaggtgaaccgctacggtgcggccgctcatatattccgtatccaattacggtgaaggaattagcgacaatgagtgggactacccgtgaaacagcgggccaaattgttaaacagttggttgcccaaaaactgctgagttatgagcataaagaatttcggtttgaaaaagccttctttaaagatgacttggcgtaaaaattaaggggcacttcgtctcgagattaagtttaaaagcccataataaatcgtcttaaaagacaactattatgggtttttatgtgccaatcattgtaaacgctttaaagggatgtattaaaaaaggagatggcatgatgaatgatgctgaaataatcaagactaagaagcggtttaaacttaaaatgccgggggcttttgtgatcctcttcatactgacagtggtcgcggtgatggcgacgtgggttgtgccgtcaggatcttacgcgaagttatcgtatgaccaaaagagtacgcaactggtcgtgacaaaaccatcaggtcaagttgaaaaggtgccagcaacacaggcatcattagaccgactcggcgttaaaatcaaaattagtcaattcacttctggcagtattaatgcagccgtatcgattcccaatacctaccaaagattgaaacaacggccggccagtttagcagctgttcctaacagtatggttcgtgggaccgttgaagctgtcgatattatggtttttattttagtattagggggcttgattggcacggtcaaggctagcggggcatttgagtcggggctgttggccttaaccaagaaaacaaaaggtcacgaatttttgttaatctttttcgtcgcgattctcatggttctaggcgggactttatgtgggattgaagaagaggcggtggccttttatccaattttagtaccggtctttattgcgatggggtacgattcgattgtttgtgtgggggcgattttccttgccagttcaattggcacgactttctcgaccattaaccccttttcagttgtgattgcttctaacgccgcgggtattagtttcacggaaggcttgttgtggcgagttggcggctgtatcgtaggggccatttttgtcatttattatctctatcgctattctaaaaaggtcaaggctgatccgacccaatcgtattcatatgaagatcacgacgcttttgataagatgtgggcaattacatctgaggggacgcagtcaaaagccgtttttacctggcggaagaaattaattctggtcttatttgtggtgaccttcccgattatggtctggggcgttatgtctcaagggtggtggttcccaacgatggcggcgtcatttttaacgtttgcgattatcatcatgtttttaaccgcgacaggaccagagggcattggtgaaaaaggggttatcgacgcttttgtgaacggtgcttctagtttagtgggcgtctcgctcattattggtcttgcgcgagggattaacttgattatgaatgaagggatgatttcagataccttattacaatattcgtcatcattagtcgcacatgttagtggtccgatttttattttgatcatgttagtgatattcttcgtgcttggctttatcgttccatcttcttcgggactagccgtcttatcgatgccgattttagcaccgttagcagatacggttaatattccccgatttgttgtggtaacggcctatcaatttgggcaatacgcaatgttgttcttggcaccaactggcttggtaatggccaccttacaaatgttagatgttaaatacgctcactggttacggttcgtttggccagtagtcgcttttgtgctgacttttggtggggccatgttagtcttacaagtcctaatttattcgtaaaatcgcgtagagaaataacgtgttttcttgcttaatcactaaagtctgatagaatgaagcaagtagaaattctagaattggagtcgattaaatggaaccagcgatcaagtatcgtttaatcaaaaaagaaaaacatacaggcgcgcgtttaggcgaaattgtaacaccgcacgggacttttaaaacaccgatgtttatgccggtggggacccaagccagcgttaaaacaatggcccctgaagatttgaaagaaatgggtgccggcattattttgtcgaatacttatcatctatggttacgccctggtgaagatatcgtcgaaaaagcaggcgggttgcataaattcatgaactgggatcggggtgtcttaaccgattcaggtggtttccaagtcttctcattagcaaaattacgtgatatcagtgaagaaggggtggccttcaagagtcatttgaatggtgaaaaactattcctatcacctgaaaaagcaattcatgttgaaaatgctttgggcgcagatattatgatgagttttgatgaatgcccaccattcttcgaaagttatgactacgttaaaaaatcagttgaacggacttcacgttgggctgaacgaggcttaattgcgcatcaaaacccagccacacaaggcttatttggaattgtccaaggggctggttttgaagacttacgtcgccaaagtgcgcgtgatttagtggggatggatttccccggctattctatcggtggtctttcagttggtgaatcaaaaggtgaaatgaaccgggtacttgattttacaacaccgatgttgcctgaagacaaaccacgttatttgatgggcgttggctcaccagatgcgttgattgatggtgtcattcggggtgtcgatatgtttgattgcgtgttaccaactcggattgcgcgtaacggaacaacgatgacgtctcaaggccgtttagtggttaagaacgcgaaatattctgaagatttcagaccactagatccaaaatgtgactgttacgtctgcaagaattacacacgggcttacattcgtcatttaatcaaagcggatgaaacttttgggattcatttaacgagttaccataacttatacttcttgatcaacttgatgcaccaagtgcaagatgcgattgaacaagataacttattggaattcagagaagcattcttcgaagaatacggctataacgaaaataacggccgtaatttctagcgaatcactggaagttaggcgataagtctgctaaagttgattagtagataaataacgaaaagaggtattttaaatgttaaacctagtattaggtgccaatccatttggcggcaactcaagtttcttaatcatccttgttttgatgatggtcatgatgtatttcatggttatgcggccacaaaagaaacaacaacaaaaacatcaagaaatggttaaccaaatgaaaaaaggtgaccaagtcgtaacaattggtggtttacacggtgttattgactcagtgaataacgatactaaaattgttgttttagattgcgatggcgtttaccttaagtttaacttaagtgctatccggacagttgaaccaactgctaaggcaacagaaacagttgttgaagaaacggttgacgaatcaaaagaagaaacaaaatagtaatttaaaaagcgtggttaattttctagcgatagaaaaattagccatgctttttttgtgattggtattagtgattttaaatacaatcagcggtgatgtgataggttattatgaatttgatgtgttaaattggtgtttttaatctgttgaaaaaatcacaataatggtttacaaacggtttcaaatgcgttatgctttctttgttaattaaatcacatataaaaattatggaggcattcctgatggttaaaaaagaaggcgttaaagcggttgttgatgcggtatctgaagtggataagatggtgacggatttagtcacacgggcccatgaagcacttaaaatcatggaaacattcgatcaagcaaaggtggatcatattgtccaccaaatggcgattgccggccttgatcatcatatggaattagctaaaatggccgttgaagaaacgggtcgtgggatttatgaagataaagccattaaaaatattttcgcaacggaagaaatttggcacgcgattaaagataataagacagttggtgtcattgaagaagatcctgaacatgggattactaagattgcggaaccagtcggggtcattgctggggtaacacctgttaccaacccaacttcaaccacaatttttaaggcagagattgccattaaaacacggaatccaatcatctttgcttttcatcccaatgctcaaaaatgttctgccagagcactagaagtcattaaagaagaagccgttaaagctggcttaccagctgacgccttattattcattgaagaacctagtttggcagccacccaagctttgatgaatcataccggcattgcaacggtcctagcaactggtggaccagggatggtcaaggctgcttattcaactgggaaaccagcattaggggttggggctggtaacgcaccagcttatatcgaagaatcagccaatatcaaacaagcagtcaatgatttaattctatcgaaatcatttgataacgggatgatctgcgcatcagaacaagcagtgattgtcgatgctaaaatctacaacgaagttaaaaaagaattccaagcacaaggtgtctattttgctaaagcaagtgaattaccagctttaaacgaagcaattattgatccagctaaaaacgctgtgcggccagcaattcctggtcaatcagctgctaatattgctaagttagctgggattgatattccagaagatacacccgttttaattgctgaaatcaagggtgttggtcatcaatatccactttcacatgaaaaattatcaccagtcttagcgatgattaaagctaaagaccgtgaagatgggttggcattatgcgaggcgatgcttgatctgggtggcttgggccacacagcatcattgcatacgactgacgatgcgttaccattagaatttgcaagacggatgaaggcttgtcgtgtattggtcaatacaccatctgcccaaggtgggattggtgatttatacaacgaaatgattccatcattaacacttggctgtggctcttatgggcataactcaatttcacataacgtctcaacaatcgacttattgaatattaaaacattggcgaaacgccgcaataatatgcaatgggtcaaattgccaagcaaaatctattttgaaaaaaattcggtcaactatttagaaaagatggctgatttaaataaggtttttatcgtcgctgatcaggggatggttaaccttggttatgtccggattgttgaagaagtgttagctaaacgggcgaatgacgttcaaatgcaaatcttctcagatgttgaaccagatccatcaacaaacacgatttataagggtgctgcagcgatgcggagttttgaaccagatgcaatcgtcgcaattggtggcggttctgtcatggatgctgctaaagggatgtggttattctatgattcagaagaagccgacttctttggcgcaaaacaaaaattcttagacattcgcaaacggacttacaagttccctaaacttaacaaaacgaagttaatctgtatcccaacgacttccgggacgggttcagaagtaacaccttttgcggtgattactgatagtgaaacccatattaaatacccattggcagattatgcattgacaccagacgttgcgattgttgacagtcaatttgtcgagagtgtgccaccacgagttgttgcacacactgggttggatgtgctctgtcatgcgactgaaagttacgtatcaacaatggcttctaactacacgaaggggcttagtttacaggcgattaaattagtttttgataacttgaaggctagttacgatggcgatattacggccaaaggtaacatgcacgatgcctcaacaatggcggggatggcctttgcgaatgcgttattaggcatcaaccattcactggcacataaattaggcggggcgttcaacttacctcacggtttaatgattgccatcacgatgccgcatgttatccgctataatgcgacaacgccaaccaaacgggcactctgggctaaatatagttacttcagagctgatgaagattacgccgaaatcgcacgttatattgggttgaagggtaatacgacagcagaacttgttgaagcttatgcaaatgcagtgactgaattggccgaaagtgttggcattcaaatgagtttgaaagctaatggcgtcacaaaggcggacttcaagcaacatgtggatgagttagctgaattagcttatgaagacaactgtactgttacaaatccaaaagaaccattgattaaagaattaaaaggcattttagaggcagaattttaaaataaattgaacaaaagggttaagctgaacaagaagggcttaatcctttttatattgcctaaatttaagcttgagagtattaatattatccaaaatagggcataatagagggtagacattcatttaattcagggagaactgagaaaagtttgtcgacaaacttgattaaggatcgggatggcaatgacacccaataaagaagactatttaaaaattatttttgaacttggtggcgacgcaaaaaaagttaccaataaggaaattctagcgggattgaacgtttcggcagcatcagtcacggaaatggtcaacaaattagtgaaagagaattacgtcaaccacacaccctatcaagggattcaattgacaagtgaaggtgctagagaagcagcgctattagtgcgcaatcatcgcttgtgggaagtttttctagtcgacaagttacattatcaatttaataccgttcatccagaggcggagcaactcgaacatgtgaccaaccacgacttggctgaacgcttagccgattttctaggtcatccaaaacgatgcccgcacggtgggattattcccaatgccaagggtgagtttgaacaacagagccatcacgcgttagtcgaccttgaagttggcgaaaaagcagtgattgaacgggtactagatgataatgatttattgaaatacacattagaaatcggcttgacagttggcgatactgtgaccttgacgaaggtgggcctttttgaaagccccattaccgtgatggacgaaacacagcaaactgaaattcaagttggcattaaagcggcgcaacacatttttgtgacgccaattgcagcagattaataaagaaagtggtgtgaacatgcgctcagatttagcagcattatttattatatttggtggctcgggagatttagcacaacgcaaattatatccagccctttttaacctatatcgtaaggggtacttaaaagaaagcttcgcagtgattggcaccgctagacgaccttggacggatgaacattaccacgaaatcgtgatggcctctctagaaggttttgaagaagatgacgaaacgaaacaaacttttactagtcacttctattatcaatcgcatgacgttacggatgctgaacattatgaaacactgaaggcattagcagcgaaattagatgataagtaccaattaaaccaaaaccgcatctattatatggcaatgtcaccccgttatttcgggacaattgcgagtcatttagggtcagaagctttattgaccgcagatgggttcaaccgtttaattattgaaaaaccatttggtcgtgattatgaaagtgccaaagcactcaatcaagaattaactcaaacttttgatgaaaaccaaatttatcgaattgatcattatttaggtaaggaaatgattcaaaacatcgttgctttacgtttcggtaatggtctattgagtggtgtttggaataatcaattcatcgataacgtgcaaattacgttagctgaatcagttggggttgaagaacgggctggctattacgaaacatctggtgctttgcgcgatatgttccaaaaccatatcatgcaagtcattgggatgttggcaatggaagtcccagttaacttctcagcagaagatgtgcaacgcgaaaagacacgtctgttcagaagtatccaaccttattcaccagcagagattaaacaaaactttgtccgtgcgcaatacgctgaaacaacggtcgatggtgaaaacaaaccgggttatcgccaagaaactaacgtggcaccagattcacaaaccgaaacgtttgttgctggtaaagtgatgattgacaacgaacgttggtgtggcgtgccgttttatgttcggaccgggaaacgtttagcgcgcaaggaaacccaaatcaacattgtcttcaagaagaccggggtcaacatttttgctgatgataaatcagatcgctcagcaatggcaccagatgtcttaaccatctatgtggaaccagaacaaggcttctcattaacaattaatggtaaggaagtcggtcaaggtttctcattgaaacccgaccaattgaattatcaatacgacaaacaaatgttagctgacagtccagaagcttatgaacgtttgattttagaagcgttaaatggcgatggcacaaactttacgcattggcatgaattggctgcttcatggcaatttgtcgatgcaattcgccaagtttgggacgcagatcaaacaccgcttcctacgtatgcaatcggttcgatgggccctaaagaagcgacggatttattggcttcaacggatgccaaatggatttttgatccaactcaaacaaaaaaataagaattgccgagaagtctgcgtgtgaagccattcataccaggcttttcttatcgcgtgaaagtggaggtgtaaaatggctgaattatttaagattccgttggaaaatgatacgagtcgcaagattattcatattgatatggatgctttttacgcctccattgaagaacgtgagcagcccgacttacgccaaaagccgttgattattgcccgtgatccgagtgatacggggggcaaaggggtcgtgacaacggccaattacgttgctcgccaatacggtgtgcattcggcgatgagtgcccaaaaggctgccgaattaattcctaaacaccaagccgtttttaagacgccaaactttccgctgtatcagtccgtttcggcacagattcacgatatttttcatacggtgaccgataagattgaaccgattgcctttgatgaagcttatttagacgttactgaaaataagttgggattaacgcacacgattgaagtggtcgcttacttgcaaaaggcgattttagaggaaacacagttagtcagttccgctgggatttcctacaacaaatttttagcgaagatggcttctgattaccgtaaaccggccggtcgaacactggtcttgccggaacaagcaatcgcctttttaagccgattgccgattgaaaaatttagaggggttggtcaaaagacggtgccgaagatgcaggatttaggcattatgaccggtgctgatttattggcgcaatcggaaatgtttttgatgcaacattttggcaagttgggttatgggttatatcgccatgtgcgggggattgataaccggccagtcgaataccaacgagaacgtaaatcaatcggtaacgaacatacttacggacaaccattgattagcgaagaacaagtgcaggtccaactgaaaagcttggcggttgaattggcacaacggctgcgcaaaaatcaaaaacacgggttaacagtcgttttaaaagtgcgtaatcggcaatacgaaacaattaccaaacgcaaaacacttggcgaatatgtcgggaatgcagctgaattagaggcaattgccaaccaaatttggcaatcaatcgggcaggcggaagttggaattcgcttgttagggattaccgtgaccaatttagcacctcagacttttgaaaatataacgctcccactttatgattgggaaaatgattgatgagattactttgtctttgacgcgtaaaaccgatatactgtaagtaactatgaaaatgggctaatagtcgaattggcgcaaaataggattaactaagcggaaacggcggtggtgtttgagtggcaacgaagcatgatcaaatattaatgtacattgagaatttgccaattggcgataaaatttcggtgcgctcaattgccaagacgctagcggttagtgaagggacggcttatcgggcaattaaggccgccgaaaataacggtttggtcagcacgattgaacgggtcggcacgattcgaattgaacaaaaattaaaaggtaagattgaaaacctgacttttgctgagattgttcaagttatcgatggtgaagttttaggtggcaaagatggcttgaataagttgttggataagttcgtaattggtgcgatgcagttagcagcaattacccggtacatcacgccgaaatcgttattgatcgttggtgatcgaattgatgtgcaacgattagcgttggaaaatggtgcggcggttttaatcacgggtggctttcacacctcagatgaagtgattgcacttgctaacgagctagcattgcccatcttgcaaacgacttacgatacgtataccgttgcgacgttgattaaccgggcattaaccgaccaattaatcaaaaaggaaattacgacggtcgcttcaatctatcgcccattttcagaaacatactcattattggcgactgatacggttggcgattacaagaaattgagtgccgcggttaaacattcacgcttccctgtgattaatgaacaccggcgcttagtcgggattgtcacggtgaaggatattttggataaaccagcttcgatgacgcttgataaggtgatgactaaagaacctgcgagtgttaagaagtatatgagtattgccagtgtcggacatgcgatgacttggaatagtttggaaatcatgccggtggttgctgataatcttgaattagaggggattatcacgcgccaagacgtgatgagtaatatgcaaacggcccaacgacaaccgcaagtggccgagactttctacgatcaaattatcgaactactgcaccctagcgagagcttccccgaattttattcggcggcataccagtttgaagtgagtccgcaaatgaccaacaatttagggacgatttcatttggtgtcttgagcgaagccgtttcggccgcttgtcagcgcatgttgcaagcgacacatcaacgccattcaatgattgaacagattaatttgcattatctgcgcttaatccaaattgaaagtcagattcagattttaccgcggatattagagattggccggcgttccgctaaaattgatgtcgatgtttatgccaatcacgtcattgttgccaaagcaattgtgacctgccaaattttagaaagaggttaatcaatgactattccagaacaaattattgctaaaattaaagcttatcaaacgattattattcatcgccatgtcaatccagatccagatgcgattggttcgcaagttggtttggctgaagtgattcgtaatagctaccctgataaaaaggtttaccaagtcggtagtgataccggcaacttagcttggttagccaatgcgcaaccaattgatccggctttatatcaaggcgctttggtgattacaactgatgctgccaacacgccccggattagtggcgaagattataaccaaggtgcttacttgattaaaattgatcatcatcctaacgatgaaccctatggtgatttaaattgggtgttaccggatgcttctagtacatccgaaattattgttgatatgatcaacgatagccaaggccaattacaattgaatcaagcagccgctcgtgtgctttacgccgggattgtcggcgatactgggcgcttcatgtttaattcaaccacaccgcacacaatgacatgtgccgcgcaactgatgacgtttgacattcaacatgataagattaaccaacggatgaacgagattacactcgaacaagcgaagttacaaggttacttatttgatcaattgcaggttaatgacgaccaagtggcttatctggttgtggaccaagaaacgcaaaaacgtttgaatgtatcagcccaacaggttcattcaattgttggcacacctggccgattaaaaggtgtgttaacgtgggtcatttttgtccaacaagacgatggtacttatcgcgtccacttccgttctaaagggccaatcattaatgaattggctaagcaacatgacggcggtgggcatccgcttgccagcggggccaaagcagctgatcaagctgaaattgacacgattattacggcattatcagcgcttgctgctgattacacagcacagtaacagatacttttttgacggatttaaacaatagaaagcaggactttatggataatcaatttacacaatttaatctaaaaccagaaatcattacggctttagacgagatgcactttacaaaaccaacggcggttcaacgccgtgtgattccagccatcaacgctggtaagagtgttatcggacaatcacaaacagggagtgggaagacacatgccttcttattaccacttttaaataagttagtccctgaaaaagacgaagttcaaatcgtcattacagcccctagtcgggaattggcttaccaaatttatacggccgctgaattaatcacaaagcatatgaatggtgatattcggattggtcgctacgttggtgggactgataaacaacgtcaaatcgaaaaattacaacaacaccaaccacaaatcgtgattgggacacctggtcggattttagatttgattacaagtaaggcacttaagatttatacagctaaaacattagtcattgatgaagctgatatgacgcttgatatgggctttttgaagccagttgataatattgcgagccgcttaccagaagacttacaaatgatggtcttctcagcaacgattcctgataaattacaaccattcttacaaaaatacatgcataacccagtaattgaagaagtgaaaaatgaaacgattattagcccaacgattgaaaactggttggtgccaactaagggcaaagccctcaatcaaacaatctattcattaatcacaatgggccatccattcatggtcttgatctttgcaaataccaagagcaaggttgatgacatccatcattacctccaatcacaaggtttgaaggtcgctaagattcatggcgatattccaccacgtcaacggaaacggattatgaaggaagttcataacctcgattatcaatacgttgttgcgactgatttagccgctcgtgggattgatatcgaagggattagcatggttatcaatgccgaagtgccacgcgaagatttagaattcttcgtgcatcgtgtgggtcggacaggccggaatggtcttaagggtactgcgattacactttatggtccagatgacgaacaagctgttgcacaaatcgaagcaatgggaattaagttcacaccaaaagcctttaaagatggcgaattggtgacttcttatgaccgtaaccgtcgtaaaaaacgggttgcaacaactcatgaattagacgttaacttgaagggctttgttaaaaaggccaaaatcaagcgtaagcctggttacaagaagaagattaaagaagcaatccaaaaggatgcgcgtcaaaaacgtcggattgaacaacgtgttgaaatgcgtgaacgtaaacgtaataataaaaaacaaaatcaataataataatcgctaatgagtttataaatgaggtgttgtcatggtacatgaaaatgacttgcaattaccaaattggttacaattatcggaacaagcccggcgtgctaattttggccaggttttacggtattttgtcagcccacttgtcgccattgaagggattcaaccggaagtggtccaggctggtcgactaacatttaagacatatagtgcttggttttctggtgaacagttcgtcttcattccggcacaatcagccgttagtttaggttggtcattgggcgcggataagctggcaccgagtgaatggtttgcacaaaccaatcggcaactggctgctaacgaggggcaactctgggcagataaggctgatgtagatgcgtatgttgagcaactcaccacgccgagtcggattgttaatatgccagcgttactggtggcacgagaatccgtaccgcgtgattggctagcgcaagggcgctattcaccaatcacacgacattttacaggcaaccaactattcttcagtcgttttcaagctgagattcaaaatggactataccgaacgcagcctgagacaccgttgttagaaacggcgcacttagtgttacggcttttggcagaccaacaagtttatcaggtttttgagaaaatgactttcacggatcaacaactcagacaaacattgcggcaacaaggctatgactttgtcagtgttgatcagtacgaatggttaagaggtgcgggtgcgcccactttatggccaagtggcaatcatttaccacaaccaatggctgaatcagcggcttcgtttggtttagattttacggctgaccaacaggcttatgaaataacaactgacccgcttgtttacaagggtgggccgtgtgtcactggtggtcgctatcaacttgaacgtcagttaccaagctcgccattttatgaatcaggcgtatcaactgcgttgatgggcaataccgatcttgcgacgcgttatcggcgcacaatcactgttgcactcgagtagttgacaagcggcggattattttctatacttttgaagtgctgggatatacgttaatcattagaacaacaggaacaacacccttgactgagaggtgctgactacggattgacgcgctccccaacgcctaaataattgaataaactcataaagaggttaacgactaacatcgttgcaatcaaggtggtaccgcgcttttgcgtccttgaatttgcagcggtgttttattttttaaggagagaatgatatgaaacaactcacaagcgcccaagtgcgccaaatgtttttagacttttttaaagaaaaaggccatgatgttgaaccaagtgcctcattgattccagacgaagatccaacgttattatggattaactctggggttgccactttgaagaaatattttgatggccgtgttgtgcctaataatccgcggattacaaacgcacaaaagagtattcggacaaacgatatcgaaaacgttggtaagactgcccgtcatcatacattcttcgaaatgctcggtaacttctctgttggtgattactttaaagaagatgctattccttgggcttgggaattcttaacaagcgacaagtggattggtttagatcctgaaaaactttacgtgacagtttatcctaaggataaggatgcgcaccgcatctggcacgaaaaagttggtttagcagaagaccgaattatcgaagtggaagataatttctgggatatcggtgaaggcccatgtggtcccgattcagaaattttctacgatcgtggtcaaagcttcaacaatgtcagtgaagacgatcctgaaaactaccctggcggtgaaaatgaacgttatctcgaagtttggaatatcgtgttctcagaatttaatcacttaccaaacggtgaatatgtcgaacaaccacacaaaaatattgatacggggatgggtcttgaacgacttgtctcagtgattcaagaagccccaactaactttgaaacagatttatttatgccattgattgaagccacagctgcaatgagtgaccataaacaatacggtcaaaatgccgctgacgatatttcatttaagattatcgccgatcatgcacgggcagttacctttgcgattggcgatggcgcaatgccagctaacgaaggacgcggttatgtgctccgtcgtttaatccgtcgggccatcttaaacggtaagaagttaggcatcaacgacgctttcatgtacaaattagtcccaatcgttggcgaaattatgcacagctattacccagacgtcctagaacaaaaagacttcattgaaaaagtgattcgttctgaagaagatcgtttccgcgaaactttaaatgatgggttacgcttattaaaccaaacaatcgaagccgttaaagctgaaaacgaaactgaaattaacggcgcagatgctttcaaactatttgatacatttggtttcccaatcgaattaacaactgaatatgctgaagatgaaggtttaaccgttgatcaagctggttttgaaaaggaaatggctgctcaaaaagcacgtgctcgtaatgcacggagcgatgaacaatcaatgggctcacaaaacgaagtcttattaaacatcaagactaagagtgaattcacaggttacagcgaattagaaactgaaagtcgtctagcagatatcattcaagataatgctgaacaagaaagtgtgacaaccggcgttgcgcaattagtctttgaagcaacaccgttttacgctgaaatggggggccaagtggctgatcaagggattatcaagaaccttgccggtcaagtggttgctgaagtcacagacgttcaatacgcaccaaatggccaacctttacacactgttaaagtgttaaaagaaatgatcagtggcgtccactataccttatctgttgatccaaccttcagaggcggcgttgttaagaaccatacggcaacccatttattggatcaagcattaagagatgtgttagacgaacatactcatcaagctggttcattagtggaacctgattacttacgttttgatttcactaacctgggccaagtgacaccagaccaattagctgaagtggaacaaatcgtaaacgataagatttgggcagctcttccagttaatacggttgaaaccgatattgaaacagctaaacaaatgggggccatcgcgctctttactgaaaaatatggtaaaacagttcgtgttgttcaaattggggattactcaatggaactttgtggtgggacacatgctaataacacctcagatcttggcttgttcaagattaccagtgaatcaggtattggggctggcacacgtcggattgaagccgttacttctaaggcagcctttaaatatttaaatgacaaacaagtgcttttaaatgaattagctggtgaattaaaagttgcacaaacaaaggatcttcctaagaagattcaacaattacaagctgatttaaaagcagaacaaaaagaaaatgaacaattaaaagctaaatttgcgcaagaacaagccggcaatgtttttgaaaatgttgttgaagcaggtcaatggcgcttagtggcagcagatgcaaaggttgccgggatgaatgaattacggcaattagcggatcaatggcaacaaaaacaaatttcagacgtcttagtgctcgcaactgttgcgggtgacaaggttagtttgattgtggcagtagctcctgatgcgattaaagctgggatcaaagctggtgacttaatcaaacaaatcgccccacttgttggtggtggcggtggtggccgtcctgatatggcccaagctggtggtaaaaatccagctgggattccagatgctttggcagctgctaaagaattcttagcttaatagataaaaaataaagttgattatttttaatcaactttatttttttgcagaaaacagcatgttccgtttgaattgtggtatagtggatattcagcattatgacaaccgagtgatgcgagttgtacttttactgattttcgagtagaatatggttgtataagtagcgaaaagttgaggtgttgagagatgaatctagataaaacagtccattttgattttggtaagaatagtcctaagaatgtgcatgaaacattggtaacggtctaccaaactttagaagataagggctataatccaattaaccagattgtcggctacctgctatcaggggatcctgcttacattccacgctataacgacgctcgtaacttaattcgtaagcacgaacgagatgagattatcgaagaactcgtgaagaactatcttgataaggggaatactaaataatgcgcttaatgggatttgatgtcggttcaagaaccgtcggtattgctgtgagcgatttatttggttggaccgcccaaggtgttgaaatcattagaattaatgaagatgaatctgaatttggtttagaccgagtgaaggaactcgttgcacagcaccaagtaacgggctttgtcttggggttacctaagaatatgaataattcaatcggcccccgggcggttaaagcacaggaatacggtgccatgttaaccgagttattcccagagatcccagttgattatattgatgaacgactaacaactgttcaggctgaacggatgttagttgaacaagctgacacctcacggaaaaagcgtaagcaagtgattgataaacttgctgcggtaatgattttgcagaattatttggatgctaagggccctttgacgaaacaagggtattaaagcaaccggttaatgaatttgataattaaatattaaggggttttgatgaatgactgaaacaaataagaacatccaccaagaagcagaacaagaaattactttaatcgatgatcaaggtaacgaagaattataccaagtgctctttacttttgattctgaagattacggtaaatcatatgtcctattatacccagcaagctcagctgaagacgaagaagtcgacatccaagctttcgcattcacatcagacgttgcaggagacgccagccaaggcgatctcttcccaatcgaagatgatgaagaatgggaaatggtagaagaagtcctaaacacattcttagcagacgacaatatgcaataaaacagagtgcctctcaagcttgatcagattttgagcattagcataggttgtcagattagcgattatatcgctaatctgacaaccggcactaagcgcagaaatctagcttgggaggcacgttttaattagactgtcgattatttgactgacgtgctaaccacaagaatcaggttggtatggcacgttttgttagagtgaccgctctagcttgggaggcacgttttaattaggctatgccataaaaaaaatagggatcaagacgctaaatcgtcttggtccctattatcattatgagcgtaaagcctgtgcttttttagtgttaataaaatgcaatttagcaaattggcctaggtactctaaaccgccttggtccaataaatcagccgcaattttgtcgatcgatttgtgtgcaccgactgggatgtcgcgtccagcgagtttggaaagttcaatcattgataggttagcttgatggcgagcaataatggaggctgccgcaaccgctagatgaaactgttccgctttagttgtaaagtagacgttatcacgtaataccaccggttcgtcttttaaataacgatagtaggtggcacggggttcgaattggtcgattaaaatgccttggggctgatcaggttggatttttttcaaaacttttaagagggcgaagttatggctgaccgccttcattttttcgatattcatttgttcgtgaacttggttatacttttgcggcatgatattgacgatatgataagggagtttggtcatcattttaatcgccatctgatcaatctgagcgtcagttaatgtttttgaatcagcgacgcctaaattgcggacaaagctgagattttcctgactgacatagacggcggcaatcgtcagtgggccaaagtaactgccattaccgacttcatctgagccgataaccgaccagttagcaaaatcgggtggtagtgtgtcacctttagcagaccccttagtagccttacttttcttggcaggtactagtgggccccatttagcggcggctgcttcggctgttgcgccttgaaaaaggactttgccggagcgatagccggtaacgttcaaaccgttaccacggtgggcaaaaacggcaccaggtggtaggggacggttggacggataagtttgttgaattgtttttaattgcgctggggtcatttttatcacagcttgcatgcgccatcctcctcaatgaatggtaaaataagatattaatggtaaaattgctacttctccttatttcatgataaaatagttcagttgaagtagcaaattttatttgcgatgtctgaagcaggttaccagaaataactggttggcctgatagtgatgaatcatatcaaattaaaagcgcggttaaggggaaattatgctaagtctaattattatcttaatgttgttacatgcggtttatactgggatgcgccggggaattgtcttacaggtcgtttatgcaattggttattttatcgccttttggattgcggttccattgagtcagacactcggacctaaattgaatttgttagtgccgtatccatcggcaacagaagaaagttactttgcctttttccaacagaaggtggggttatcactcgataaagctttttatatcggtgtggcctttgtattagtgatgttcatcagtggcctgattattcgttttattggcttattactgaactcgttaacgtttatgtatgttttcagtcgctttaataaggttttaggtggtgttttaaacttcatcgttgtctatattgggattttcttagtgttatatgtcttggccttagtaccagttgacgggttacagaacatgttggcccattcgtggctcgctaagatgatggtgcttaaaacaccactattaacctcacttgtaacgcaatggtggatagttggttaacatagttgtaaggggctgacgaaggtcgccccttttttagaaggagttaacagaaatgaatcataaaatattaaaaacattagagtacgataaaattaaacaaatgttgcaaggttatgcgattacagcatttggtcaagaacaaatagcaactttagaaccgattaatgaagcagatctgattcagattcgcttaaaccaaaccaaagatggtgttgatatcgaacggttaaaaggtggcattccattgccccaactggaaaatatcagaccacatttaaaacgaattgaaatcggtgcgatgttaaatggtagtgagctcgctcaaatcgggcgcgttttacgtgcgacatctgccgtggttcgtttctttgatgacctggaaaaagacgaactcgaattaaaagccttacccgaattagtagcgcaatttgtcacgttaccacaattaaccgaacgaattagaagttcggtggctgatgatggtgccattttagatactgcttcaaccaagttacgcggtttaagaacgggcttgaagcagttagaaggccagattagaagtcggatggccagctacacacacggtgccaaggctaaatatttaagtgatccgatcgtgacgattcgcaacgaccgctacgtgattcctgttaaacaagaataccgcggccaatttggtggcgtcgtgcatgatcaaagtgccagtgggcaaaccctattcatggagccccaagcgattatggaattaaataaccgtttgcgccaattacaaattgaagaacaacaagaaatcgaacggattttggcggaattatcagaagctatcatgccggaacgtcacaatattttagcaaatgctgaattattgggtcaactcgatttcgtgaatgctaaggcccaacttgcgaaagctctaaaagcaacggaacctttaatcaatgcggaaaaccatgtcgatttaaaacaagcacggcatcctttaattgatgcgactaaagtcgtggccaatgatattgcaatcggtgcggattatcaagcgattgtggtgactggtccgaataccggtggtaaaaccatcacacttaaaacattgggcttagtccaagtgatggcccaatcagggttattcattactgcgcgtgaggaaagccaagttggtgtcttctcagatatctttgctgatattggtgacgaacaatcaatcgaacaaaacttgagtactttctcagcacacatggaaaatatcattcagattctcaaacagattgatgatcggagtttggtgctattagatgaattaggtgccgggactgatccgcaagaaggggccgctttagcgattgccatcttggatcaaatcgggattgtcggagccaacgtggttgcgtcaacccattatcctgaattgaagatttatggctacaatcgaccacaaacaattaatgccagcatggaatttgatgtggcgactttacagccaacgtaccgtcttttaattggggtacctggtcggagtaatgcatttgatatttcaacgcgcctaggcttaccaaattcaatcgtcgatcaagcgaaacagttaatgaacgatgaaagccaagatttgaacaatatgattaccgatcttgaaaatcaacgtaaagcggctgaaacagaataccaagcactacgtcatgaattgacggaagcgacggatctacatcaacaactctcaacagcttatcaacaattctttgaagatcgtgaaacggaaatgacgaaggctaaggaaaaagcaaatgcgattgtcgaaaaagctgaagtcaaagcggataaagtcatcactaaattgcgtgacatgcagatgaatcaaggcgcacagattaaggaaaatcaattaatcgatgccaaggctgaattagggcaattacatcaagaaacaaccttgaagaaaaataaagtgcttcaacgggctaagcggcgtcaaacgctgaaagttggggatgacgtattggtcacgtcttacggccaacgaggcactttaattcgccaagtcgactcgaaaaattgggaagtccaaatgggcatcatcaagatgaagattgccaacgacgatttagaaaagcaaaaagtcgttgaagataaccgaccacaacgccatgtaacaaccgttaatagcggtggcgcacgccacgttaaagcacaattggatttacgcggcaaacgctatgaagaagcaatggccgaagtggatcaatacattgatgcggcgctattagctaattatcaacaagtcacgattgtccatggtaaagggactggcgcgattcgccaaggggttcaagaatacctccaagctaaccgtcaagtgaagaagtacgaatatgcaccagctaatgctggtgggaatggtgcaaccattgtgacgtttaagtaaggtattgaaattaaaaactcagaagctagtgcattggtaatgccggcttttgagtttttttaattgttttttggcgggcaaaagtgtagactaaaagtaagcaatcggttttacacaactgattataggaggtgcggatatggtagatgttttaacggataaagattttgaagcagaaacaagccaaggtgttgttttaacagacttttgggctacttggtgtggtccttgtcggatgcaatcacctgtcattgaagaattagcacaaacaaatgataaggttaaattcacaaagatggatgtggatgccaaccctgataccccagctaaatttgggatcatggctattccaacattgctcgttaaaaaagacgggcaagttgtcgaaacaattactggcttccacaataaggaacaattaacggaaacattagctaaatatactgattagagcacaacgacgattgtaagcatgcgttgaaaagcgtctctaacaactgaaggaccagggggagaatttctttaccaggtccttttttagtcctcaataatgtgtgacaaaaatgttagtggtggttattaaatcggtgtggtacctttaataaagtaataaagcgtaccaatcagaaaaaagagaaagaaatggtgaaaatgggacaaaaaatccttaatttttggcaaaaaccagttgtcaatttcattggcagaacgattatatattttgtaattctcttaattttactctacctgtacgattacagtggtattggtagccctaaatttatttataatgaattttagtttaatgaaggagcgtaatggtgatgacaaatagcattattcaaaaaattgatacaattgcgattgaacaaccgcaaactgtagcgtatcaatacggtcaaacgcagtattcatatgcagacttaaaagttgcatccgatcgaatcgcggcgtttatccaagaccaagcattgcctaagggcgccccagtgattgtttttgggggccaacagttcgaaatggtggcgacattcttaggcgctgtcaaagcaggccatgcctacattccggttgaacaacactcagatgcagaacgcattcaacaaattgaatcggttgctaaaccagcggcggttctatcatgggcgtcagctagccaaattgaggttgacatgccggtcttccaagctgatatattagcggacgttgtggcaagtggggcaacagattatgatgcccaacaaagcgtccaaggggatgataacttctatatcattttcacttctgggacaactggcttaccaaaaggagttcaaattagtgaaaacaaccttttgagctttgttgactgggcgaacccagcctttggagttgccgataatagtcgggtcttaattcaagccccatactcatttgatttatcagtcatgaatctttatccagggctttgctcaggtgcaacattagtaattttagaaaaagaaattacggacaacttcaagactttatttgaagtattgccaaccttgaaggttaacgaatgggtttcaacaccatcatttgttgaaatctgtttactcgcaccaacgtttgatagcgaacattacccagaacttcgtgaattcgtcttctgtggtgaggaattaacgcaccaaacggctgaaaaattactcgaacgcttcccaagtgccaaagtcttcaatacttacggcccaacagaagcaacggtcgcaatgaccagcattgaaattaccgccgatattctagcacagtatgatcggttaccaattggttatacaaaagctgatacgaagacggttgtggttgatgaacaaaacaatgaagtcgctcctggccagcctggtgaattattgattagtggtcctagtgtttctaaaggctacttaaataaccctgaaaaaacgaatgctgcctttttcgaaaaagatggccaacgtttctatcattcaggagacttagtggttgccgatgacaatcaattaatcttctacaaaggacggactgatttccaagttaagatgcatggttatcggatcgaactagaagaaatcgatcatcatttagggcaactagcacaagtgaaacaagcttgcacggtccctcgttacaacaaggcacatcaagtaacgcaattaattgcttacgtcgtgccagctgaaggccaagtgggggatgcgacattaacaaaaacgttaaaagcagccctggctgaaaatacaatggcctacatgattccccaacgtttcgtctatccagaaagtttaccattatccgtcaatggtaaggttgatcgtaaagcgttgattaaagaggtaaacgggaatgcctaatttacaaccgtacgcaaatcctaattatttcattattttaggaattgcgttagtgccgctaatcattggctttttaaatggtaaacggtggcacatctatgaaacacttgtttcactgctctttttggtcttaatctttgacggtgataagattaatcaagggttagctttaatcggctacgtgatattcgaaggggctctcatttggggctacaccgtgtatcgtcaaaaacgtaataatacagcattgttcgacttggcggttgtcctagcgattatgccgctagtcattgtaaaattcgtgccatttttaaatccaggacggaattcgattattggtttcttagggattagttatttaaccttcaaagctgtcggcatgattatggaaacccgtgatgggagtattaagaagtttgaaccatggttgttcttacaattcatgcttttcttcccaactatctcatccggtccgattgatcgttaccgacgctttaagaaggattatctaaaagtacctgaacgtgatcactatatcgacatgttagggaaagcaatgcacaacttcatgttagggtttgtgtataagtttatcttaggttatgcattcggaactttgttattgccaagaatggcgcacttagccatggcaagtcgcggcggtttcttagatatttcatggggccttgtgggttacatgtatgtctatagtatgtatttattctttgattttgcgggttacagtttattcgcagttgggacgagttatgtcatggggattgaaacaccaatcaactttaacaagccattctcatcaccaaacatcaaggaattctggaatagatggcatatgacgttatcattttggtttagagattacatctacatgcggctcatgtttttcttgatgaagcataaaatcactaagagcaaagtattaatcgccaaccttggctatttaacgttattcttattgatgggcttctggcacgggttaacctggtattacatcgcttatggtttattccatgcgatttggattatcctaacagatgtctggttacgctttaagaagaaacataaggatcacattatcagcaatcgttggacaaattatctcgcaatttttgcaacatttaacacagtatgtttaagttttttaattttctcaggcttcttggaccgactctggttccattaagaccaaacaattgaaggagcgttttaatcatggatgtagaaaacacagtagtagaaattttggcagatttaacgggtaacgatgatatcaaagatgatatggatatggatttatttgaaacagggacattagattcaatggcgactgttcaattattacttgaattacaaggtcaattagacatcgacgtaccagtttcagaatttgatcgtaatgaatgggcaacaccaaacaaaattatcgccaaagcaaaggaattgcaataagatgtttaagaagttgtggctgatttttgggccagtgttaattgccggggtgtgcttaggcgcgttattattatcgccatttcgctttagtcatccgagcgctaagactttatcaacagcggcgacatcaatgtcatccaatgtgattaaaggtgaagccatcaaggatgctgcgtttaatgcggattatattcccgttatcggttcttccgagttatcacgaatggatccattacatccatccgtcatggctgagaagtatgattggaaaaataagccgttcttaattggcgcacctggtacacagtcattaacacatttcttatccctccaagcgacaggacaacacctaacgggtaagaaagcggtcgtgattatttcgccacaatggtttgtaccacgaggggttaaatcagaaatgtttgatttcttctattcaccactgcaaacatcgtacttcttagttcatgctaaggattcagcagcaacacggtatgcagctaaacggattctagatttaacgagtgatacaaccagtggggtaatgcgggatgcattaaagaacaaggcgttgggcttaccgttaacaacggtgcaaaaggtgtatatcaacaacattaagcgcccaggcttgcaacaccaagatcagctcttcagtcaattgttcattcacggtcgtgaaaaagaattggctaaaggcttgaaagttttaccagatgaacaagacttacaaacacttgaccaagttgccacaacacttggtcgcaaagcaacagccggtaatccatttgggattcaaaagaaattttatgaacaacgaattttaccaaatcaagcgaaattgaagggcgaacaaagtaactttaattatgaaagttcaccagaattttcggacttccagttgatgctcgatttctttgcacagcacaagatggcagtgcaattcatcattccacctgttaacgcacggtgggcatcttatacgggcttatcacaagacatgttaaataacttctcgacaaagatttcttaccaattgaaatcacaaggctttaacaatattgttgatatgaccaaagatggtaacgaagattactttatgcaagatacgattcatttaggctggcgtggttggttgaaggttgaccaacatgtccaaccattcatggcaactaagaaggctggtaaggtttcatataaaatatcagatgactacttagatcgttcatggcaagatgttgctggtaatcaagtacaagattttgaagaataaactaaaaaagcgtgctgacaattgtcagcgctaaaacttcggcctccgaaaattaaattaagtaatttaaattgaaagtcaaatttgttcgtacttttatgtccggattcttgacataggagccttattttcataaaaatacgttaaataatctgtataattttcatcaattaacccttctctaacgataaatataatcaaatcaaaatatggacttttaataagattttcatcgcattcaagtttattgataaagtcgttaagatcaatctctgaagaaagcaatacatcagacatggattcactatatactttctccattcttaattttagttcttcttttttattaattagatttgttcttttggtgctttccttattattcagattatttaacttaacaagatattcctttttatcttttaattcttcaaatatccctgaaatattcttagccgatagtgtagttttgagctctgacgagtagtatccggatgtatatgttgcttgtttaacgtcaaaactattattcttaattgctgcaatgaaatctgaccgattttcaaagtctgattcttttttttcattaactgtatagaatccgtctgtaggattctttaaaaataaagcatctaactcattgaccgaatttaatgtctcaatctcagaatcttctaattgcttttctaggttactaatttgcttttctatcttttctattatatcttgaattaaactactcttttttgaaaatatttcattaataaacccaatccctaattgaaatttagaaaagtcttttggaaataaatttttataaataattgtagcgagtaatttattattatccaaagtaatttctgaaagcctatccttataaattaaatattcattactgatattttttagtagtctcatatcatcgatataaagagacagttttcttaaaaccttaatatcaaaatcgttagatattccagcatctttaaaagtctgtatgaattgttcaaaagagtttgacgaatctataactggaattattggaattataaaatcaaataacttagttctatcttttgaagtaaatgcatcatccttaattagataaataaacttaatctgattctttttcttattaacagctaatctcttattaactaataaattaatttcataaaggcgttcataaatcgttggattattaaatctatctaaatcttcaaaaatgactacgttctttccagaactcgtaaaaaggtatattacatcattcataaatttatcaaaatatgattcattttgatcttgaaatatttcaatttcatttccttttatcgttattttttttaaaaattgcttgtttatttggaatttaataatactatacataaaaaatacgatactcccagtaaatatacacaatactattaaattaaactgctcactagataaaaatttcactaggttcataactaacttaccagaatttttattagtaaacgaaccatttagatatcttgtccagtttttaaatttgacaaccaacagtgcactgcatataaatactaatattagtatcgtatatttccataatgtcgattttttagtattattctttattttaaatatggtttgaggaattttgttataatcaatttgatgtaacaactgatttattatcttaccttctaaaatatttgtcccagttgcttcattcccttcaaaatgcgttaaggaaatattcataaagcccttttccggatgtttcattttgtaagattcaataacagagcttttacctgcaccatatggacctgtcaacgcaatattcgtaattgtcttttcggctagggcaaaacttaaagcctcctcatatgttgatatatcaatatcatttttcggtgttaacgattcaaaattcttctccaaaaaatactccccccacaattaattttaatatacatttaccttactcgataaaacctaacattccctacacttaattatttttaataatgattaacttaccaatatacattagttaatgcatagtatattatatgcattaaattttctttaaattatcacctagtcgatgtaccatacatctttaatcgatactgacacagtaccgattaagtagtaacaagtttctattagttagacagcctttataatatcttttttgtatagattcccaactgcatccatataaactaaacaaatctctctatctttagaccaattattattaatatattctaaaggtatagaaatttcactagaaacgcaatgcggttctattaactcaaattttctttcttctaatcctataaccacttcaagaacgggatcaataatatagttatctatatttttactttttaagttatcatgttcggaattgattatttctaaatattgtttcttagtgcatatcccgataaatttaaatgatcctgctgtatttccatcgtttgttccccagaacaacaattcttctttactagtagttatctctattccattttcatcagtgttctttattttccttatacctgaagcaataagtaaattcgattgtttatccaagcgatactgcttatcagattgttttatctgttgatatacagccacaatcgcaaaaatagatcctacaccgcttacccaatcagcaacactcccaaaatcccctttattaaacgaaagtcccattaaagttaaagatatgccgacaaaaaaagctatcattgccactattaccgttctaaaattcatttaatcaccccaataattcattatatgaaaattgcctttatacatatcatatcaattttttgagtttggcggctactcattatagatatttcacttctattttcaaatacaaataattttatactatatctccatctggcaaaaataaaaaataaatctataataaaaagactgtacccctgatagataaggagttacagccttttttctagcccacggacccttccatttcatagctaatcaatctattcaattccaccgcgtattccattgggagttccttggtgaatggttcgacgaagcccatgatgatcatttcggttgctttggcttccgagatgccacggctcatcaagtaatagagttgttcttctgaaattttggagactttggcttcatgttccattgagacgttcccgtttaagattgtattatacggaatcgtgtcggaactggatttatcatccataataatcgtatcacattcgacgtgggcaaaagaaccgtcactgtctcgttcaaaacgaacagtccctcggtaatcaactgcgcccccgtctttggcaatcgattttgaaacgattgatgaagacgtatttggtgcggcgtgaatcatccgggcaccactgtcttggtcaacgccttcgccggcaacagcgattgacagcattgtcccccgtgcgccttcaccatcgaggtagacacttgggtatttcatggtcattttagaaccgagattcccatcaacccattccattgtcgcgttttccatggcttgggcccgtttggtttccaaactataaacattcttcgaccagttttgaatcgttgtgtatcgacagtaagcatcccgtttaacgaagacttcaacgaccgcagcgtgcaagctatcacttgaataacttggtgcggtacagccttcgacatagttaacactggcgccttcatcaacaacgatcaatgtccgttcgaattggcctgaattttcagcattaatccggaagtatgattggattggaatatccgtccgcacgccttttggtacgtagatgaaagtcccaccagaccagacagccgagttgagcgctgagaatttattgtcggttggtttaaccaaagtactgaagtattccttcacaatatcgggatattcgcgcaaggcagtatccatatcggtaaagataatccccagcttttcaaattcatcgcgcatattgtggtaaaccacttctgattcatattgcgcacttgaaccagctaagtatttccgttcagcctctggaacccctaagcggtcaaaagtatccttgattttatcagggacatcttcccaatcgcggtattgtttatcagttgccttttggtaatacaacatatgctctaaatcaagaccggataaatctgggccaaaatcgggcattggcattttttcgtaagcatggaatgattttaaacggaagtctaacatccattggggttcttttttctcgtgcgaaattgcgcgcacaacatcttcagttaagccccggccggttgaaaagacgggttcaacatcatcgctaaagccgtaatcatagttctcaaattggggcatcgtcgtctcttctgtcattaatctgttccctccgtttctgcatggttcacaatttgacccgttgtcgctgtgttggtatcgctattgagcgctttgtggagcgccttccaagcaagcgtggcacatttaatccgcgctggaaattgttgaacgccctgcaagatggccgcatcttctagaattgtccaatcttcatcgcgatcaccaatcaccatgtccgaaaagcgttcgatcattacttcagcttcagtaggtgtcttatgcaagaccgcatcggtcatcatgctggcagaggcttggctgattgtgcagccttcccctgaaaaagcaatctggctaatccggttatcttcaagcgcaatctccaactgcaacacatcgccacaagttgggttacgtaattcaatttcatgatcgacagtgtctaaatgaccatgatggtgcggatgttgcgaatggtctaagatgacctgtcgatataagttatctaatttagagagtgccattttggaaaaactcctttgctgcttgaatcgcggccactaaggcttgtacgtcttctgacgtattgtagaggtagaaactcgcgcgagccgttgccgcaacgtttagccactgcatcagtggttgtgcgcaatgatgccccgcgcgaacagcgaccccttccatatcgagggctgttgctaaatcgtgcggatggagattgtcgaggttaaaagcaatcacaccggttcgctgactagcttcttgcgggccataaatcgtcaacccgtcaatcgcttgtaaggccggtaatgcctcggcgactaaagcctgctcatgtgcctggatgttggtcatcccaatctgattcagataatcaatcgcagctcctaatccaatcgcgccagcaatattgggggttccaccttctaagcgccaaggcagttctttgaaggtcgattcttgtaagccaacaaaatcgatcatctcaccaccatattcaacgggtgataactgctcaagcaaagcctgcttaccatacaagacaccaattcctgttggccccaacattttatgccctgaaaaagcataaaaatctgcatcgagcgcctgcacattaactggcatatgcgggacagattgtgcgccatcaaccaccatataaccaccttgtgcgtggactagtgccgcaatcgtcttcaccggattgacaacacctaaaacgttagaagcatgcgctaaactgacgattttagtccgtggaccaataacctgcttggcgacgtctaaatctaactgaccatctggtaatagatcgatgtagcgtagtttggcgcccgtctttttagcaagttgttgccaagggactaggttgctgtggtgttccatatagctgatgacgatttcatcgccagcttggacaactgttggtccaaaactgccggcgatccagtttaaactctgcgtggtcccttttgtgaagacaacttccgctgaagaagcggcattgataaattgttggactttaactctagcagcttcgtattgagcagtcgcccgttccgccaacgtatgcacgccccggtgaacattggcattatcatgttgatagtaattcactatttggtcaatcaccgcttgtggcttttgcgttgtcgctgcgttatccaaataaaccaaggattcgtcattaaccaattgttctaaaataggaaaatcttgccgactagtgttcagacttttgcccatcgattaacttcctctcgattgtgtccgttaattgttgacgaacatttttgtccggaatttcagtcaggacggcgcctaagaacccacgaataactaagcgttgtgcgacttctttagacaagccccgactcatgagatagtacatttgttgttcattaacacggccaacactggcagcatgaccggcttgaacgtcattttcatcgattaataatagcggattggcatccccacgggccgtccgtgataacatcaagacccggttttcttgttgtgcatcggcacctttagcacctttgatgatgtgcccaatcccgttaaaagttagggtcgcatcttctaaaataacgccatgttgcaagatatggccgattgaacgagggccaatattcgtcacccgcgtatcgattccttgaatttgtttcccagttgaaatggcgaccactttcgtttcagcatgcgaaccatcgccgaccaaatcagaatcaaagtcgccaatgatattgccgtcattcatgaagcccaatgcccaatcaatccgggcatcacgcattaagtgcccccgacgattcagataagtcgtgacagacttaccaaacgcatcaacagctgagaaatgcacgtgactattatccttagcaatcacttcaaccaccatattagctaggttcttgtgatcacccattgtttgtaggttttctaaataactaaactcactgttttgttccgccacaattaaaacgtgatggataaaatcggtggtttgcgtgctatcttggacataataagccgtaatcggttgtttaatcaccacatttttcggcacgtacaagaacatcccactattcatcaaagctgtgtgaaaggctgtcaaacgatcttcgtccggtttaaccgtcacttgcatatagtattcatgaaccaattcaggatagtcttgtaaagcagtgaagatatcggtgaagatgaccccttgttctgccaattcactaggcagattcaatttggcaatcgtttggccaacttgcacgacatagggttgatccgctgttaaatcagcgaccatttctggtagtgtatcagtcgcagaagttgtcaaagttggcgcactcgcagccataattggccaatgtttgtaattaatcttttcgaaaataggtaagtcgagcttttcaatttggcctaaggctgtttggcgtaaggctgcaaaccaatctggttcttgatgggcaattgaaaaagccgcaacttgttcaggtgtgatggctaatttctttttcatcaaagccgccccctatttactttcatcgtcagttaatttaatgtctaaccctaattcatcacgaataccggcgtaaccttcgtcttctagacgtttggccaatgacgcatcaccagtcgttacgattttaccgcccatcatgatgtgcacgaaatcaggcacaatgtagttcaataaacgttgataatgcgtgataatcaatgaaccgaagttatcgccgcgcatttcattgacccctttagaaacaacttgtaaggcatcgatatctaaacctgaatcaatttcatctaaaatagcaaatttaggttcaatcatcattaattgtagaatttcgttccgtttcttttcaccaccagaaaagccttcgtttaagtagcgttcagacatttcttctgtcatatctaagacagccatgcgttgatctaattttttcaagaaggccatgatcgagatttgatcatcttcagcccggcgcgcattgatagcagctcgcataaattcagcgttcgtaacaccttgaatttcagatggatattgcatcgctaagaataagccagcgcgtgctcgttcatcaactggcatttcaagaatattttgaccgtctaatttaatttcaccttgaagcacttcatatttaggattccccatgatggtttctgaaagggttgatttcccggtcccatttggtcccatgatggcgtgaatctcacccgtattcatttctaagttaacaccttttaaaatttctttaccgtcaattccgacgtgtaaatcgataatttctaatttagacattactgaccctccaaaaatcgcattatagcacgttgttgctgacttaattctaagctaaatgagaacgcttttcaatagaagaatgattgtaaaaaagaatcaattcttatctatctcccaaaaatatgttaataaaaaagccctatccttcgataagacttttccttcattatttaactggtaataccgccccgtgccattgctttttgatccaggcttgggttgattttgatttgagtgctttgattaacttcttgattgcgggtttgttctcgtcgcctttattaacagcgacgacgttcacgtatggtgatgagaggctttcgattgccactgcatctttttccggtgtgaagccggcttgaactgcatagtttgaattgatagcaaccagcgtgccttcatcatttttcaacaattcaggcattaacttcggctcaaacgtgtacttgaatttgagcttcttcggatttttggcgatatcattaaaggttgcattttcaactttgacccctggtttcaaggtgatcaagccgcccgtttttagaatcgagaggactcggccccaatcagtttgactgtttgaaacgaggacagtggcgccggttttgacggcacttaattttttaactcgcttgctgtaaaggcccagtggttcaagatgaatcccaccagcactcactaaatgatagccattatcgtggtttgcctttttcataaacggaatatgttggtaatagttggcggtcaattcaccgctggctaaagccttattaggtaatacataatcactgaacgctttgacatccaatgtgatgccttctttttttaattcgggtttaatgtgtcttaaaatggcggcatgcggaatggttgatgcgccaatcacaatcgtattgggatctgcttttttagcgcgacagccagtcaacagtacgccaacaattaaaagcccggcgagtacgcttaaatatcttttttgcatctacttttctccctctgttttaacgatgatcaattttagcgatgataatgtcaccggctttttgacaaatgaacacgatgattaaaataatgattgtcgccactaacgtaattgtattttggtttgcttgaaagccttcagtgtaggctaagttccccaagccaccggccccaatcacaccggccattgccgtgtaaccaagtaatgaaatcgcggtgacggttaatccggaaaccagtgcgggcatgctttctggtaaaaggacttgccagataatttgccattttgaagcgcctagtgcgcgggtcgcttcaatcaccccgctatcaacttcacgaaaggctaattcaactaaccgcgcataaaatggtgctgccgaaacgattaatgctggaattgcagctttgggaccaatcatggtacccatcaattccttagtcatgggaatcaaaagcacgatcaagatgatgaacggtactgaacggaaaacgttgacgaataaagcgacaatcccatttaacaaccgactcataaaatccattttaccgtttgtttgatataaaactaaccctaacaagaaaccgagaattgcgactagcaagacgctgacagccgttagccaaaccgtttcgcctgttgcttcccacatcgttggccagtcgatttgtttaaattgaaaataagattgaaacccgttgatattagccatgtcttaacacctctacttcgatagtttgttgacttaagtcggataatgcttgttttaaatcgtctggactagcttgaatctgaatgtataaataccccagggcgccattaatcgtttgttgtaaactaccactaatcacgctgacttcaacgcttgggtagcggcgcattaattggccaataactggctgactcgattgttcttcgttaaaccggagtttgacaatcgtgccctctggtacccgcgtcaacaactgttcgattgaagcggctgtttcgctaggcgtaatcaccaatgattctgaaacaaaggctttcgtcacttctgcctgtggcgtttcgaagatggcttgtgttgtgccttcttcaattacccgaccggctgccatcactgcgattcgttggcagatccggcgtaccgcatccatttcgtgggttaccagcacaatcgtgatgcccatttcctgattaatcttagctaaaagacttaaaattgaattcgttgttttaggatccaaagcactggttgcttcatcacataacaagatggccggttcgctgattaacgcacgggcaattgcaacccgttgcttttggccccctgaaagttcgctaggataagcggcacccaagtctgttagctcaactaatgccaacatctctttggccttagctaagcgttccttcttgccaacccccgctaatttaagcggtaaggcgatattttcaagaattgtttttgaccagagtagattgaagtgttgaaaaatcatgccaatcttctgccgaattggtcgcattgcttgttcgctcaaaccaacgatcaattgaccgttgaccaagacatccccgctagttggtttttctaaaccgtttaataatcgaattaacgtactcttaccagcgcctgaatagccgataatcccataaatttcacccgcttcaattttcaatgaaatatcactgagtgctgtaaatgtctgttgttcccgttggtaaaccttaccgacttgctttagttctaacattgcattctctccctttgactaaaaatgtacaaaaaaagtcctccctctcaaataaatgagagaaaggacgccaatttgcgtgttaccaccttaatttcacgactacttcacaataatcgccttacaaagtaccaggatcgatactcgttcgctatatcgggcaacccccgcattcggctcagttaaaccttaccaaatgaatttgctcaaagaccatattcgaaaatcgttcgtattatccgcttgcacctgaccggactctcttaaaatgctactaagttatctactcatcttttcatcgcttgtattaagtaattcttatcttaattaatcagacgccagatgtcaagtctaattatctgaaattcgaatatcggcaatccacgcatctttttcattatccgcatttaataattcgggattatcagctaaatcagtattgacgttgactaattcacccgctaaaggactatctaactcttgaaccattttttcagcttcaattgcaacaagtggcatatcaagtgccatcttttgcccttgaactgggacatctacaaatttaattaaaccaaattcactttgcgcacccttagtcaaaccaattcgtctgattgaagctgcgatttcttctgtccaaaaataatcattgttactcattgtcaattgttttcactcctagaaagtatcttcagattcgctgaacatataactcttatgatggtaccgcatcgacatgataaaaccaatccccatcatgttccccaatagcgatgaaccaccttgtgaaataaatggtaatggaataccggtcaatggtaatagaccaacactcatcccaatattttcaaaaacatggaaaaggatcatcatgataacacccgttgaaacataggcataaaactcatttttggtatcaaatgtgacccgaatcatttggtagatcaacaagaaatacaataaaatgactaaacaagaaccaatgaagccgaagttttcaccgattacggagaaaatcatatcggattcacgaacgggtacgttaacctgaatctgattgaagcctttaccaaataattgaccagacccgatggcctttaaactttgggataattgcaaacttgtgctggccgtattatcaaacggatgtaaccaggcatcaattcggttaaattgataggttttaaagcctaagtgagttaagattgcccgccctggggttgttgccgccaaggtcaaagcagtcccaccaatggccgccattatcgccattgcaggtgctagaatcttccaagtaatcccagatactaagataatgccacccaaaattgcaacgaacactaataatgtcccaaaatcattctgtaatttcaagagtaccataactggtaatgtccaaattaataatcggcctaacaataaccaatccgtattaatcgtgtgttctggatactcggtattgtgcttagtcacaacccgactcatcattaagatataagccggcttcatcacttcggaaggctggaacgaaattggccctagcgagaaccaacttttagcaccagtttgaatcgccactgcccgattataaaagaataaaacggcaactaagagaaaaatcccaatgccataagcaatcggcgcaactcgccagagctgttccgaatcaaactgcatgatggccacaattgcgatcccaccaatgacgtaccaagccgcctgcatcagcacagctcgcgttgagctggcactacttgtatcatgcgttaccgcgacataaatcgacattaaacccactaacgctaacatgaagacggaaaaaacaatcccgtaatctacacgcgaagtatcgtcgactttttctaattcctttggcatgttaagtctccttcaactaaaaactgtcttaattataaaataacccggccaaaaatctgccgggttactctaaagctaattaattcttaagaattaaccttggtgtaagtgatactcccgtagtaattcgttaacagcatcgtcgtgtgttttagtaatgatgctttggccagtaccttcgacagttgcttcgaaccgttttttagtactgtcttcgataataacaccgacttcgtttttgccaactttgacactcgtcattgcttggccgttgcggttaatatcatcaattgtgacttctacgcgttgttcttttttagacatattttttgaaactccttattttgtaacattagtcattaacagacttattccgaaacactgtgaagtggtccggaacgggatcataaccaccctttacaaacggatgacaccgcaaaatacggccgattcccataatcagtcccttaatagcgccatgtttttgaatggcttgaatcatataactagagcaagtcggataataccgacagctcggtggtaagaatggcgaaataccagtttggtaaaaccgcacaagtgcaattaatatcttttgcatgcaatcaccacttatcctgacctactgcaagaaattaataatgtgactccaggtacttggtaaaaagacggcaaatgggttttgaccacccattgcaaaaccaatcatttgaccaattaacccagcgaaaatcattaaaacaatgactagtaagatctttttaagaactggtttgacgtgctcttcaaaatttgatcgatacacaatattcacaatcccttacttctgatttagtgtgctcgtttttgggcaatattttctaataaaacacccgtacctaaggcaactgcgtccaatggcttttcagctaagacaactgggaccttaaggtgttcagaaaagaggttggcaatattgcgtaatagcgcgccaccaccggttaacataatcccgcgatcaataatatcaccggctaattctggtggtgtcacttcaagcacttctttagcagcggcaacaatggccatcattgtttcgtgcaaggcaagctcaacttcatccgcaccaatcgtgattgacactggtaaaccaccgacaatatcacggccacggacttctagttgttcacttgcatcagcatgccaaacactaccaatcttcaacttgattgtttcggcagtatgttcaccgattaataagttatgtttacgtttaacgtatgctgcgatttcagcattcatgcgatcaccagcaagccgtaatgaacgacttgtcacaacttcacccattgatagtacggcgatatcactcgtcccaccaccaatatcgatcaccatgttaccgcgtggttggaaaatatccatcccagcacccacggccgcaaccttaggttcaaattctaagaaaactttaccgccgccagatttttctgcagcttctacaattgctttttgttcaatcgatgtaatatttgttggacaacaaattaagatgtttggttttgatagaaaacctttgacgtttaatttattaatgaaataagcaagcattgcttcggtcatatcaaaatcagcaatcacaccatctttaagtgggcgcactgccaaaatattgccgggtgtccgaccgaccatgctgtatgcttcagaaccaactgctaatactttttttgttttagtatcgatcgcaacgactgaaggttcattaagaacaatgcctttgtccataacgttaattaagacgttggctgtccctaaatcaattccgatatctttagccatttagtgttgctccttccagaaaccatattcaatagtcaattataccacaagcctaatatcaataaaatataagtttcgtttacgaaattaacactaaaaaagaatgacgtccgtctaaaaacgaatatcattctttaataactgctaattaagctaatttttgagttgttttacgatgaccggcttcatcaaaatcagcacgactgatatgtgcgcctaaggcacgtaatttttgatggaagtgataataaccacgatccatgtattgtaggtttgtgacaagtgtctcaccattggccactaaaccagcaatcactaatgctgctgctgctcgtaaatcagaagcggccacttcagcacccgttaattcagtaggaccgtataagatgacagattggccttcgatttggtaatcggcattcatacgtcgtaattcttctaagtgcatgaaacgattctcgaagactgtttcagtcatgacactcgtcccatgagccatcaattgtaaagcggtcatttgtgcttgcatatccgttgggaaaccaggatatggcaaggttttgatattacttggtttcaattcatcagggccgataatccggatgccattttcttcctcgatgacttgtgcgcccatttcagctagtttagacaataaaggtttattatgttcagaaatagcttcttcaactaaaacattacccttagtagctgctgcggcaatcatgaaggtccctgcttcaattcgatcttgcacaatactgtgttcggtcccctttaattcagtaaccccttcaatccgaatttcttcagtcccagcaccgaaaactttggcgcccatcttattcaagacgttagctaaatcaacgatttctggttcgcgggcaacgttttcgatgactgttgtgcccttagctaaggttgctgccatcatgatattttgcgttgcaccaacacttggaaagtctaaatagatgtttgcaccaactaattggtcggccttggcttctatgtaaccatgactttgtgtaatcgttgcgccgagtgcttcaaaacccttgaggtgtaagtcaactggtcttgaaccaattgcacagccacctggcatggcaactcgggcatgacccaatcttgctaataatggtcccatgacaacaattgaggcccgcatctttgaaacatattcgaatgccgcttcaaagtttagtggttgattggcatcaatcattagatagttacgttgttcatcaaatttaacacgtgcatccagactcttcaaaacatcttgcatcataaaaacatctgataagattggcacgttcgttaattcaactggtcctttagaggctaaaagtgccgctgccatgattggtaagactgcatttttagcaccttcgatgtggacatcaccaactaatggttgtccgccttgtatgatcaatttttccaagagtttccctccgatatgactgctaatttattggactaaaaaaatgatattgcgcgcttgcgcgataatttctaaaaagaattgactcactaaataacccattacgatggctgtaaacatgagaacaatctgaatctgtcgaatatgattcggtttaaaaagctgttcaagtcgtaaagactgtagaccgtaaaaactaagaacgataaagccgatatgactaataatggtaacaactgcttgtgatccaattgattgcacttcaataacgcccctctatgaatggatatagggacattgtaacacacagaaaagtcccttgtctgtatttagctgttttcttaataaaagaagattggattgtattataacacaacaaaaaaagcccccacgacttttgccgtgagggcttcttgcaataactattgtaaatgatttttgacgtcaatccggttcatcgcgcgttgaagtgcgatttgagcccgacgtaattcgtctgaatcatgtttttctgaagccgtcttaatagcgtcttcagcacgttgtttagcacgttgggcacgtgataagttaatatcgcgcgcacgttcggcaccatcagcaacgattgaagcgatgttatgactaacttccataaagccgccagtaattgcaatggcgtcttcatgccctgggttatccgtccgcttaacacgaatttcaccaatttctagaggggtaataattggctcatgattagccataataccgagttgtcctgccattgctggtacaaccaacattgaagcatggtgatcataaacgacaccatcaggagttacgatattaacggttaataccttttgctcttctgccatcattaacgcccctttctagtcttgatcgacagccttttcagactgtgtatagcccatttcttttgcctttgctaatgcagcgtcaatgttcccaacaagacggaatgcttcttctgggacatcatcgtagtcacccgcaaggatggctttgaaaccagaaacagtatccttaactggcacgtatgaaccggcttggcctgtgaaggcttcggcaacgtggaagttttgtgataggaagaattgaatccgacgagcacgtgcaacgataatcttttcatcatcagataattcatccatacctaagatagagatgatatcttgtaattcacgataacgttgtaagacgtgttgtacttcagaagcaacttcataatgttcttggccaacaatttcaggatcaagcgcactagaagatgattctagtgggttaacagcagggtaaataccttgttgtgttaacttacgatccaagttagttgtggcatccaaatgcgcgaaagttgtcgcaggcgcaggatcagtataatcatcggcaggcacataaatggcttggatagatgtaactgaaccttttttagttgatgtgattcgttcttgtaattgacccatttctgttgccaatgttggttggtacccaacggctgaaggcatccgtcctaatagggcagaaacttctgaaccagcttgcgtgaaacggaagatattatcaatgaacaatagcacatcttggccttcaacatcacggaagtattcagcaattgttaaaccagtcaaggcaacacgcatacgtgcaccaggtgattcattcatttgaccgaaaaccatggctgtcttttccaaaacgcctgattctttcatttcaaagtataagtcattaccttcacgtgttcgttcaccaacaccagtaaagacagaaataccaccatgttcttcagcgatattatggattaattcttggattaagacggttttaccaacaccggcaccaccgaacaaaccgattttaccaccacgcacataaggggcaagtaaatcgataaccttaatccctgtttctagaatttctgaacttgtatttaattcctcaaatttaggcgcagaacggtgaatactgtcgcgtctaaaatctgcaggaaattcttcgccgccatcgattgtttcgcctaagacgttgaaaacacgtcctagagtttctttaccgactggtacgttaattgcacgtccagcatcttcaacaggcatgccacgacgtaaaccgtcagtagattccattgaaattgtacgcattaccccgtcgcctaattctagagcaacctctaaaacgacagtttcatcattacctttatcgactgttaaggcattattgatatctggtaaatccgtatctaaagaaaattcgacatcgacaacgggaccaataacttggacaacttttcccatactcatagttgtttcttcctcccgcatttttattctaatgctgccgcaccaccgacgatttcggtgatttcagttgtaatttgagcttgacgtgcacggttatatttaattgataattctgaaattaaattattcgcgttatcggtcgcactcttcattgctgccattgaagcagcatgttctgctgttttagaatctaacattgcgccataaattaagctttcggcgtattgcggtagaattgcgtctaaggcatcatccacggaaggttccgtaatgtattctagattttgatcagcaacttctgaaacatctaagtcggtaattggtaacattttttcagctctaaagccagatgttaatgagttaacatggtggttgtaacaaacgtacaactcatcgtaaacaccattatcatacatcgcaacggccgttttaataatttgtttaacttcttcaaaagaagggacatcactgacaccacgatattcgtaagttaagttcatgccacgtgctttaaagaaatcagcaccagtcccgccgaccgcaagaattgcgtattcgtcaggtgattgatgcgtttctgaaatcatttggaccattgcttttaggattgagctgttatatgcaccaactaagcctcgatcacttgtaataactaagtaaccagttttcttaattggtctttccactaacaaattactcaacgttacttcgtgcttgatcgcctttttaatagttgaatcagcaggttctgcttgtaaactactcttttgacgagcaatgtcaattaattgacttgcagctagatgcgtcacgatttctcgaatcttatcagtataaacttggtaagcaactgagttcttttcgatttgagaaagcttagcaccagaaaccatttgcatagcacttgtaatttgcccagtttttttagtagaggcgattcttcgtttgatatccattaaagattcagccaattaattcaccccttacttatctgagtctttgtcatcgacagcttgttctggtacaaaaccttctgtgaaggctttaatagcagcatcaagtttgtctgtgtctggcaatttagttgtttgacggatttcatccatcaagtctttagcgttactttctagataatcatttaaaccactttcataacgcatgatgtcatcaacaggtacatcatcgatgaaaccgtgtgttaaggcatataggattaccgtttgttgttcaaatggtaatggtttatgcaatggttgtttcaagacttcaacagtccgtttaccacgatttagtttggcttgtgttgcggcatctaaatcagaaccgaattgcgtaaaggcttctagttcacggtatgatgaaaggtcaagacgtaatgtcccagaaactttcttcatagccttggtttgagctgccccaccaacacgagaaacagatgaaccagcatcgatagctggacgtgttcctgaatagaataaatcactttccaagaagatttgaccatctgtgatcgagataacgttagttgggatataagctgaaatatcaccagcttgtgtttcgatgataggtaaagcagtcattgaaccgccacctaattcatcacttaacttagcagcacgttctagtaaacgtgaatgtaagtagaagatatcaccagggtaagcttcacggcctggaggtcttcttaaaagtaatgagatttcacgataagcagcagcttgtttacttaaatcatcatagacgattaaaacgtgcttgccgttatacatgaattcttcacccattgctgcaccagcataaggggcaatgtacaagagtggtgcgggttggctagggccagcttcgacaacaattgtataatccattgcaccataacgccgtaaggtttcaacttgtgttctaacagttgattccttttgaccaatggcaacgtagatacaaatcatatcttgacctttttggttaataatcgtatcgatcgcaacagatgttttaccagtcttacgatccccgatgattaattcacgttggccacgaccaattggcaccaaggcatcaatcgcttttaaacctgtttgtaaaggttctgaaacagattgacgagccataacgccaggtgctttcttttcgataggacgtgttttgtctgttttaatttcgccgcgtccatccactggttgacccaaaggattaacaacacgaccgattaaagcatcgccaacaggtacttccatgatccgacctgtccgtttaacttggtccccttcacgaatattttcgtattcgccgaggatgatgataccaacatcatttgtttccaagttttgtgccacaccgtatgaaccgttagagaattctaacaattcacttgagagggcattttctaaaccgtgagcacgtgcgatcccatcaccaacataagtgacagtaccgacttcttcaacggctaattcttcattataatttgctagttgttgtttaattaatgcactgatttcctcagttttaatgctcatcaggttcacctctttatcaacgattgactatttcaataataacgacttaatttggtctaagccgtgtttgacacttccatcgattaccttatggttcgattcaagcacgataccaccaataatatctggatcaacgacactttcgattaacacttcgtttaaaccttcgcgtttagcgaaagattgactgatcttagctaattgatcatcgtctaaagcaactgctgaagtcaccttagcgtgtgcaatccccttatgttgatcgtaaagatcttcataagctgcgataatataaggcatttcagccattctttgatagtcaaaaactaagctcaaaaagtgttgcattaaagtactaaaatcattactcaacgattctaataagttacgctgtttcaacccagataaggttgtatctgttaaaactgtgcctaattttggattgtcattgaaaatggtctcgagtgcttgtatctcatcatggatactttcaaattgttgctcttgttctgcaagggaaaataaggcctttgcatagcgttgtccgactgcatacttatctagtttcattttgcttgtccaacccttcaatataggaattgatcaatgacttttgatcagtgactgacaattctttcttaatgagtttagaagcaatttcaatagataattgagcaacatcatctctcgcactgtttaacgcatctaaacgagattgttcgatgtcttttttagcattttgttttaaagtttggacttcttcttgagcgagggtaaccataccttcgcgttgtttttcaccgttttgtttagctgtgttaacaatctcaacggcttctgatttagagctcttcaactctgttgcacgttgtgcggccaatttggcagcatcttcgcgtgattgagcggcgctatctaaatcatttgtgattttatttgaacgttcctgcatcatttttgaaacaggtccgaaagcaaatttacccactaaagcgactaagatgatgaagacaacaagtacaaatagtgaatctccaaggtaagatgcagaagcaccaacgattaaattactaaacatctattgacactccttccttgacttactgtctaatttttaaagtgaaacgttgttcactcggattaactaaataagatcaagaaagaaacgacgattgataaaattggaacagcttcaattaaaccaacaccgataaacattgttgatcttaattgtgctgacaattctggttggcgtgccatactttcgattgtcttagaaattaccttaccattaccgtatgatgctgcgaatgctgcaagtcctgctgcgatagctgctgctaaaaagttcatatttttttcctcctgattttagtcttccatttcgactttctctgaaatgtagaccattgataatgttacaaatacaaaggcttgaattgatccgataaagacggagaagccttgccataccatttgaattggtgctgtgacaagcattgtggctgggccatgcgagaaagccatcttaactaaaagattcaataaaacttccccggcaaaaatgttcccatacaaacgcaatgacagcgtcaagaaattggtaaattgttcgatgatattaatcggtaagaaaaatcctactggtttaatataactcttcaaataattaccaaatcctagtcgttcaatactgaaataatgcgaaaggactaatacaatcatcgctaaggacattgtaataatcggatccgcagttggactcttcagccaaaccacttcgtccaccttcatctggaaaatcaaaccgaactgattactaatgaatacgaaaagaaacataacaaaggcaaataggtagaattgcttcccttcttcgcccggcatagcactcttaacgataccattagtaaaatcgatcatccattccaggacgttctgccgcttggttggtttcaacgcaatctttcttgataagaagaagacgagcgcgaaaacaattgctgcacttaataataccgaaaggcagttcgctaaattaaaacgaattcccaaaatgctaataatgggatatttatcacccacaagattccctccttccctaggcttatttaatagttaacgcgagttttccgattaacaactacgtacaaccaattaacctaaaaaacagtaacatttatgtaaagagacgcataaattattaccgcaacacaattaagataataccaccattaatttgaaagtacaaagtaattagtgattaatttgtaattattttttgttgagtcggttaagcgttaaataaagcgttagcatgttcaaaatgtaacgttgggtatcaaaaaagcgtccgccaaatcgccgaacgcctcctattatatgtgcattaattatttagtcccgaataagcgatcaccggcatcgcccaaaccaggataaatgtagccttcttcattcaatccatcatctaaaccagctgcataaatatcaacatctggatgtgcttcttgcacagctttaacgccttcaggtgctgctactaaaacaactaaacgcattgatgttgcgccacgttttttaagggcatcaattgccataatagcagaaccaccagttgccaacattggatcaacgatgaataattgacgttggtcaatatctgttggtaatttaacgaaatattcgtgtggttgaagcgtcttttcatcacgatacattccgatatgaccgaccttagcagctggaatcaattctaaaacgccgtcgaccatgcctaaaccggcacgtaaaattgggacaactgctaattttttaccgctcagttgcttttcaatagctgggcccattggtgtttcaacttcaacgtcttccattgctagatcgcgcgtaatttcgtaaaccattaattcggcaatttcattcgccacttcacggaacactttagtccccgtattcttgttacgaataattgttaatttgtgttgaattaacggatgatttaaaactgtgaactttgccattaccttttgcccctattctattcaatttgatggaaagaatttcaacaaaaaagagtgactccaaagaaaacatcctctgagccactctcctttccgcttaaaattctgtttactattgtagcgtatatcacagtaaaaaactagcggtattcctaaattaatctaaaaactttgcttgtgtgattgggaattggtcggttaatttcaagaccgcttcactaattgctgtcatcgcttctagttgatcatgtttttcgatcacttctagaattaaattggcaatttgttcacaatccgtttctttaaagccacgcgatgtaatggccggtgtgccaattcgaatcccgcttgtcttaaacggacttaatttttcaaacggaattgtatttttattaaccgtaatatgcacgctatccaatagattttgcagttcttttccatttaggccactattggtcaagtccaatagcatcaaatggttgtccgtcccccccgaaacgacccggactaaatctgattggtcaaagacagctgccattgcttgcgcatttgcaacaatttgttttgtataagctgtaaattctggttggagcgcttcaccaaatgcaactgctttagcagcaatcacgtgttctagtggtccaccttgaatccctgggaaaatggcagagtcaattgccttagcatattctgctttgcaaagaatcatcccaccacgcgggccccgcaatgtcttatgagtggtcgttgtgacaacatcggcatatggcactggactcggatgaacacccgttgcgactaaaccggcaatatgggccatgtcaatcatcaaataggcaccaacctgatcggcaatttcacgtaaccgcggaaaatcaattgtgcgactataagctgaagcaccagcaacaatcatcttaggatgcacttcttgcgccttagcagctaagctagcataatccaattgttcgttggtatcagcaacgccatagctataaaagtcatagagttggccactaaagttgaacggtgacccatgcgttaaatggccgccatcagttagattcatccctagaatcttatcgccagattctaatagcgcttgataaaccgccatgttagcttgtgaaccagagtgaggttggacgttgacgtgatcggcaccaaataattctttagcccgttcaattgcaagtgtttcgatttgatcgatatactcgcaaccaccgtaaaaccgcttgttgggataaccttccgcatatttattcgttagcacactgccctgtgcctcttgaacagcacccgaaacaatattttcagacgcaattaattcaatattatgacgttgccgattttcttcttgcttaattaaatcattaatcactggatctgtcttagctaacatgcacaacactccttagggggattattgggtcaaaagtgctcacttgcaattcacgatcactggtcattaggcaattacttaaccattaatcggcttgttgcttgctaaaatacttttgccctgctgatttttcgagacggttcatatacgctaaaccaacaccttccttggcaaagccttggacaaggattagtttaacttccggattcaaatcaaaataccgtagtccttcaaataaatgctggctcgctgtgacaaccgattcacctaatgagaattggtccttgaagcggacttttgcttgcttttccaaaatcgtatcgacggccatcacaccaaatgggacagcttgttggctagcccagtcaatcgcagcatcaaagtcatccggattagcgacaatataaacctgtgcgttaggcgcataatgcttatacttcatcccgggtgctttcggtgtttctgctgctccgactttgtgcttattggtcataattggaccaatgacgcgttcaatagcttcttgtgttaccacgcctggtcgtaaaataactggggttgcgacacttaagtcaataaccgttgattccaagccaacaccggtaggcccgtcatcaatgacgccggcaatcttccctgtcaaatcatgtaatacatgatcagcaagcgttggacttggtttcccagaagtattagctgatggaccaacgattggtaccccagcggctttaatcaatgacaatgtcacttgattgtctggcattctaaaagcagcggttttcaaaccacccgtcacaacggcatcaaatgccccatgcttcaagggcaagataatcgttaatgaaccaggccaaaaagctttgactaattgcccaaaagccgggtttgacgtcactgcgtaatgttcaaccgtttcaaccgaagcaacatggacaatcaatggattatcgctaggacgtcctttggcagcgtagaccttcttaacggctgctggcttagtcgcatctgctcctaagccataaaccgtttcagttggaaaagaaactaattcgcccgcatttaaagcagcggctgcttgttcaatttggttgactgtgtatcgttttgtttccattatatgccttccttaatcaacatcttattctataataacaaattccgattaaaatcgtaactcacacgcatcattctagaccaatttgccatatctttttgtacttccaagctaaacagagggtctctttgttcaaaaatccgaacaatcgcttctttttgttgataaccaaactctaaaaagagtgcgccttctggttctaaaaatgcggggacttcctgtgcgaagcgttcataaaaggctaacccattattaggcgcaaataacgctaagtctggttcgtgtttaagtaccgaagcatccatgacagagcgttcgtcttctgcaatatatggcgggttcgaaacaatcacgtcaaattgttgccccataacaggcgtcaagaaatcaccttcgatgaagtcaacctttgcacctaatgtttgggcattttgttgagccacggcaattgctgccggtgaaatatcaaccgcagccacttgccaatcagggcgttcacaggccaaggtaatcgcaatggcaccagaaccggtcccgacatctagcacttttagtggtctatccttaacaggggctactgacaatacccattctaccaattcctcggtctcaagtcgcggaataagcgttgcgggcgtcaccttaaaatcacgtccgtaaaaattggcataacctaaaatatattgtgccggttgatcctccgcaaatgccgccaaatcggcttgatattgttcatactcgtttgcgggcatttcatctctgtaatgcaatactaattgagtggtcgtccaatgatgacgtcctaataataggaaacgcgctgcttcatgttccttattgcgttcttctaaaaataaaaaagcccaattcagggctttaagataagtgagctgtgccatcttgtaattgctccaatttctctgtttgatcgaagaggattaaggcatcgattacgtcgcctaattcaccattcataatgcgatctaacttattgagcgtcaaaccaattcgatgatcggtcacacggttttgtggataattatacgttctgattcgttctgaacggtccccagaaccaacggctgatttacgacttgagtcatattcactctggttttgtgattcataataatcataaacacgtgcttgtaaaatcttcattgctttaacacggttttgttgttgtgaacgttgatcttgcattgccacaacaatcccagttggaatatgggtcatccgaacagctgaagaggtcttattaatatgttgaccaccggcaccagaagcacggtaaacatcaacccgaatatcttttgcttctaattcgacatcgacaccatcgtattcaggcataacagcaacggttgctgttgacgtatgaacacggccttgtgattccgtctttgggatccgttggacacggtgtgcaccattttcatattttagtttagaataaacattcttaccggtaatcatcatcgcaacttctttgaagccgccgacttcagtagccgtttcatcgatgatttctgtttgccagttttgtgattcagcgtaacgttggtacatgttgaggaggtcaccagcaaatagacttgcttcgtccccaccagcagcgccccgaatttccatgatgatattcttttcatcgttagggtcagttggtaacattaaaatcttaatttcttgttctaattgggctttttcagtttggagttcttctaaatcagccttaactaattctgtcatttcagaatcggttgtttctcgcaaaagttcttcattttcagtcacttcgcttaaaacttccttcaaacgcgtatacttgcccacaatttcgcgcaagcccgcttcttccttagaaagttccatgtagcgactggtttcattaatcacttctggatcagacattaattcctgtaattctgcatagcggtctaataaaccatcgagttgttcaaacattttatccatgaatgattagccttccttttcaatctcttcttgtattggtgggttaaaatagtgcttccggcatactggatagtaagcttcattgccaccgatttgaatctgttcacctgtataaacaggcaagccgttattcattcgcaagttcataatcgcctttttacggcagaaccaacaaatggtcttcatttcttctatcttattggcaaacaataagaggtatttcgagccttcaaataattcattcttaaaatcatttttaagaccaaacgccatcaccgggatattcaaatcatcaacgactttggcagcttcgataacatggtgccgttctaaaaattgtgattcatcaattaaaacacaagcggcatctggattagttgcttcaaccaattcgtaaatattcgtgtccgaaaagattggtgttgcttcgcgtttcaaaccaattcgacttgaaacgattcccacgccgtcacgattatcaatcccactggttaagataatcactgatttattctgttcttcataattatgagcaacttttagaatttcaattgatttaccactgttcattgcaccatatcgaaaaaataattgcgtcatttccaaacacccctatatcaaagcacattttagtctagtatacctgaaaataggaatcgcaacaatatcggccccgataaaaactaaagtttccataaattttgccccttcatgacttccctatcgtcgttttccagaaaatatgctattattatgaacattgaaagggtggcttgcatgacaattaaaagttcatttgcaacaacaacgggacgtttttcatactggttcttacatacctttatgaaaggcggcagctctttacctggtcagattgcaacaaatctagaccccgctgttttgaaaaacttaactaaaaactacgacgtgattatcatcactggaactaatggtaaaacattgacgacagctttgacggttcaaacgctcaagcaaaaatacgacaacatcatgaccaattcaacaggatcaaacatgatgcaagggattacgacagcctttttggcccatcatcctaaaaaaggtcaaaaacaacttgcaattcttgaagttgacgaagccaacgtcgaaccactttgccgctacgttgaacctaaggcaattgtgatgactaacatctttagagatcaaatggatcgttttggtgaaatttataccacttataataagattttggctggcgttaagctcgtgcctaatacaaccttaattatgaatggtgatgtgccacttttctcatcggttgaattacctaatcctaaaatttactacggttttaatcatcaaccagatggcgaaatgctcgcaccaagcaatacagatggtgttttgtgccctgtttgccaacatatcattcactacaagttcatcagttatagtagccaaggcaaattctactgcccaaattgcggcttcaaacgccctgaactaacggatcaagtgacggccatcaacgaaatgcgcccaacaagttctcaatttgaaattaaccaagctccttttgaaatctcaatcggtggtatgtacaacatctataatgctctcgcagcttacagcgttggccgcttcttggatgtccctgtttcggatattcaaaaagccttcacgcaaaataaaaaagttttcggtcgccaagaagtgattcaattgaaggacaaggcggtcacattggtgcttgttaaaaacccagttggcttaaaccaagtcctccaaatgattagctctgatccagaagatttctcattggcaatgttactgaacgctaactacgctgatggtattgatacaagttggatttgggacggtgaattcgaagacctcttgaaacaccacattccaacggttatcaccggtggcgaacggcgtgatgatatcactttccgcttgaaagtggctggcgttactgacgaacaactacacgaaacagccgacttagatgcgacactagcagcgattgaagcagcccctacgaaacatgtttacgtacttgctacctacacggcagtcttgcaattacgtaaaaaaatggcagaggccaactacattaagaaaggactgtcagtatgacccaaactttaaaaatttgtcatctttatggcaacttaatgaatacttatggggatctcggcaatattttagtcctcgattattatgctaaaaagattggtttaaaaacagaaaccgacgtcatcagcattggccaagatttcgatgccagccgctacgacatcgtcctcttcggtggtggccaagattttgaacaaaaaatcatttcagaagatcttaccagtaaaaaagctgcactcacagcatacatcgaaaatggcggcgtaatgcttgccatttgtggtggttaccaattattgggccactactacatcggtgcgaacggtgataaaattcctgggattggtgcccttgatcactatacactcagccaagataacagccgttttattggcgatatcgtgattgaaaaccgtgaatttaacgaaacttacctcggctttgaaaatcataacggtcggactttcttaggaaaagatgaaaagccactcggttacgttaaacgtggtcatggtaacaacggcgaagacggcactgaaggttgtgtttataaaaacacctttggttcttacttccacggcccaattttaacccataacggtgtcttagctaaacgcctcttaacaacagcgattagccgccgtttcccagagtttgatcttcaaccactagcggaccttccaatcgaagaatcccgttaccaagtcgacgcagctggtgtcaaaaaggtgcaaaattaagtactcccaaaagaaccccgacaatatctttttcgatattgcaggggttcttttttacattttaatctgccaattttaatctgccaattttaatctgccaattttaatctgccaattttaatctgccaattttaatctgccaatgttaatctgccaattttaatctgccaattttaatctgccaatgttaattgactttgagccgctgccaaacgcgcacttggcacacggtatggtgaacacgagacataatcaatgcccaaatcacgataaaacggcatcgctgttggatcaccaccgacctcgccgcaaaccccaatcgataaatcaggtttggtttgacggcctttttgaaccgccaattgcatcaaagcaccgacaccatcttggtcaagcgtttgaaagggttcagccggcatcaagccttgttgctgataatccggcataaaatggccaatatcatcgcgggaaaaaccatacgtcatttgcgttaaatcattggtgccaaaactgaagaaatctgcggtcgctgcgatttgatccgcaactaaacacgcccgcggaatctcaatcattgtgccaatttgataagttagttgttgctgattttctaccaaatagtcgttgatggtttgttgtaatagttgttttagatatgccatttcagtcgctgtgccaattagcggcaacattattttaggcgtcacggcatggtggtacgttgtttgaaccgccaaggcactctcaacaatcgctaagacctgcatttggtaaatttcaggataggtcaccgccaaacgactgccacgatggcctaacatgggattaacctccgctttatcagcaatccggcgcttaatttcggccaaactaatgcctagcgcggttgctaattcagcctgttccacttcattttgcggtaagaattcatgcaatggtgggtctaacaagcgaattgtacatggtcgctcttcagctaatgaaaagatttgcttaaagtcagttatttggagggcttttagtgccgccaatgccacttggcgatccgctagttcagttgctaaaatcatttggcgcattttaaaaattcgttctgggccaaagaacatgtgctccgtccgcacgagtcctaacccctgtgcaccaaattcaaaagcagtcgccacttcttgcggtgtctcagcgttagcccaaaccgcaaatggtgcaatctcatcacaccaactgagcaccgttccaagcgttgtttcatgaacgcctgtttgttgtggcaacgcccctaaataaaggcgaccggtatgaccatccaccgaaataatcgccccttcttttaaaactcggccggcaaaatgtgcctcacgttgttcataatcgacttgaagttgctgacaaccaacgacacagcaacagcccattccccgtgcaacaaccgccgcatgcgatgtcatcccaccacgactagtaacaattgcttcactaattaccatcccatcgatatcttctggtgatgtttcttggcgaactaaaacgactttttcaccagcttcgtgtgcctgttgtgctttttgggcgtcgaaatagatcgcaccagtagcagcccctggactcgctggtaacccagtcaataactgtgttgcctgttgcaccgcactagtttcaaaaagtgggtgtaacaacccatcaatcatcgtcggcttcaagcgactaatcgcggttggccgatcaatcaccccttcatcaactaaatccacagcaattctaaaagcagccggtgcggtgcgtttgccaacccgtgtttgtaagacatataactgcccagcttcaatcgtaaattccatatcttgcatatcccgatagtgggcttctaattgattggcaatcgttttgaattgttcataaattactggcaattgcgcctttaacgtcgcaattggttcgggggttcgaatccccgccaccacatcttcaccttgtgcattcaataaatattcgccaaacaaaccaggttcaccagttgctgggttccgagtgaacgcaacgccggttccactttgcccctgataattaccaaagaccatttgttgcacgttgactgcggttcccatggcaccgtcgatttgatttaaacgtcgataagtctgcgcacgtggattctgccatgatttaaagacagcttcaatggccagtcgcagttgttgatcaaccgactgtggaaattgatattgtccggccgctacgtacaagcctttataggtttcaatcaattgttttaaatcaactaacgttaagtccgtatccttttgaacttgccgtttatttttaagtgccgttaatgccgcttcaaaaattggcttatcaataccgtaaaccacatccccaaacatttgaatcaaccgacgataacaatcgtaagcaaaccatggatcattggtcatttcagctaagccgattaccgtttgatcgtttaaccctaaattcaagatagtatccatcatccccggcattgagattggtgcaccactgcggacggacaccaataacggctgctcagcattccctaattgccgctgcgtcttttcttcaagaatatgaaccgctttcattaattcgtcttctaaaaaacccgtctcttgtttagcacttgttaagtattgtcgacaagcagccgttgtaattgtaaaaccggctggcacgggtaatcctaagcgcgtcatttccgctaagttggctcccttaccacctaattcttgattggttaacgtttgatcttcagcaaaagcataaatatagttcatgatagcgcctccaaattttatcgataaccgcattatatagtgtgtcacattgcaagtcaatagtgtagtttataaattttaataggccacgctattgtgtgaatatattgcaattagcgtaacgctatcctataatgagtttattgaaaccgatttattcaaaggagcgcttatggaattatctaaccgccaacaggcaattatcaaaatcgtcaaaggaaatcaacccattagcggcactaaaatcgctgaacaattgcatctttctcgggcaacactgcgcaatgatttcgcaatcttaaccatgaccggtattttggacgcccgccctaaagttggctacttttacgtcggccaagaagtgatgccgctcttaaccgatgaactctaccaagaaacagtcggtcaactgatggtcccacctcttttaatccctcaaacgacaacgatcgatgaagcagtcacgcaactattcatgcacgatgttgggtcgctttatgtgacggatgaacagtcaggtttactgggcgttttgtcgcggaaggacctactacgggcaaccattaatacaactaatacgcaagctaccccagtcgctatgattatgacgcgaatgccaaacattacaacgaccaccgaggacacacctgtcttacacgccggtcaacggttaattgcccatcaggttgattcactaccagtggttgccattgatggcatcacggtcattggcaaaatcaccaaatcgattatcatgcgctatttcatcgaagccggactacacaatcaatcataattttttggaggattacaaaatgacagcgattccaatttttattatttcagattcaattggcgaaacagcccgaacagttatcgcagcggttaacgcccaattccccgcgtcagtcacccttaaaattcaacgctttccgtttattaccgatcaaaaaacattaacccccattttacaagatgcccatcaagaacaggcaattattgtcacaacacttgttaaccacatacttcaagaaacggtgacgcaattttgccaagtcaagcatttgaccttaatcgatcttctgtctccgctgaccaccgccattagcgaacgcagtcaaaccgcatcactggaaaccccaggctcattacggaaacttgatgaacactattttcatcgcattagcgccatggaatttgccgttcgttacgatgacggtcaagatccacgtggtttattagaagccgacatcgttttattaggcgtttcacggacctcaaaaacgccactcagtatgtatttggccaaccaaaactatcgcgtggccaacttaccactcattcccaacgtaccgttaccaaaagaattattcaaagtgcccgcccataagattatcggtctaaccatgccactttcaacactgctaaaaatccgccaagaacgtttggccaccttgggattaccgcaaacaacgaactattccaatatgacaaccgtcggtgacgagcttgcctatgccaaccagatttttgaacaattaaacgccacgacgattaatgttgccgatcgttcgattgaggaaacggctagtttaatccaaaccttaatctaaagattaaggaaacgacttaaccttttttaaagaaaaaagccgatttttattcataaaatatcaattgtttgataacattccccggctatactgttgttatagattaaaaggagcgatcgatatgctaataaaaaaccaaaacattgaatccgttaaaattaaaagtattgatagtcaagataaggtcctcgcgacaaccgagtccggcgaaattatcgaactacatatcaccgatcaacaaaagaaggatcggcttttctgggaatcattggtgaacgttttacgcgctgaactctggctccccctcaaaaagaaaacccatgaactcttacaaaacgactggttagcagaaccagaattaaattaactaaaaagaacgttgaccagaagtaattctagccaacgttctttttttagttatttttcaccttgccattccgcaatgtactcggccacaaaatcttgcatgacttgtgttctagcggttgcgatttctcgcgccacttgcgtattcatcgtcgccgcgagtttgaagagcttttcataaaaatgattaaccaccgttgaaggttcccgataattagccttggttaactcggcccgtggttgaatttcaggatcataagccaccccatcgtgagcgccgccatacataaaggtccggccaataccaatcgcgccaatcgcatctaaccgatccgcatcttgaacgatttgcccttctaaacttaatgcttggtgctgattaatatttttagaaaatgacatatgatcgatgatgtcaaaaataacggttgattgcatcttatcaatgccattttgggttaaaacagccgctacgctttggcgggcttgtgccacatcgctaacaattttttcatcaattacatcgtgcaatagtgcggctaatgtaatcgttgttaagtcgccatcaccaacttggcgttgaattaagcgggcattatttacaacccgttgaatgtgatcaaaaccatggccactatgctcctgagctaacgctgttcgtacgaattgttcaattgcttcaatttgtttttgcataactgccaccctactcttttaatcattaaaaaaattgcaaccacggctgcggttgcaattcgttatgtttattttacttgttacccggttctgaagcaataatttgcatgttaccttttaagtcccatgacttaatgccaaatggtaagacaaagtgcatgttcttatgaattaggtaggtttgaccatccgcaaccaattcaccttcaccgtcaaccactgatactaaagtataaggggctgttgtccggtcaaagtgtaaatcacccttgaccaaccattggtaaacactgaaaaatggtgacattgggggttgcacataagttgtgatggttgaatccccaacgtgttctgtttgaatattcaaaacaggatcttgatggggcacaatcgtggtatcaattgattgttttagatgcaattcacgtttttcacccgtcttcgcatctactcgatcataatcgtataaccgataagtcgtatcactactttgttgcgtttcaagggccataatccccttattcaaggcgtgaattgtgccacttgggacgtagaaaaagtcgcctgttttaacaggtactttgcgcaataagtcatcccacttacccgcttcaatcatttccgttagttctgctttgtttttagcatgatgaccatagattaagtaagcacctggttcggcatctaaaatataccaacattcagtcttacctaattctgtaggaccttcgtgagcagctgcataagcatcatctggatggacttgaactgataagcttgcttcagcatccaaaatcttcgttaataatgggaaaacttctcccttggcatcaccaaaataatcgcggtgttgggcccaagcttgatctaatgtaaggccttttaagggaccgttttcgattgtgctgggaccatgtggatgtgctgaaatcgcccagcattcaccaatgtcgccatctggtaaatcatagtcgaaggcttctgctaatttgcggccaccccaaattttttcttggaaaactggttttagaaataatggttctgtcaattcaatcactcctaatgcactttatttatcaatgtttctattctaccataaatgaaagcggataagacatggtagtaactgtttttaaagcgatttcgtgattaaaccttatcttcagccaagaattgatccacaatcattgtccgacgatcaagaaaagcttgattatctgctgtcgggtgaatccgattgctcaacacaaccaagcctgtctggcgttttcgatcgagtaacataaaagtccccgtaaaaccggtatgataaatcaatggggtctgatccgccgtaaaacgtaaatcccaacccaatgaccggcctagatgagctggtgtccagtcgcggtataagcccttaacacttgcttggctaacgggggcctcagcaacctttaattgccccagttggaactgcgcaaaccgtacaacatcgtctaggggtgcaaataatcctgctgcaccactatgattttgcaaaacataactcttcggatcatgcacaacaccttgaataaggcctctagccgttgttagttcagttggtaccgctcggcttgcttctggggcaaacgtactctcagtcatccctaggggggttaaaaccagactttgaattaagtcttgaattggtttaccataaatcacttctagcatccagcccaaatacaacatgccgatatctgtgtagacaacctttttcccaaaattaggtccaaccgtcaattgcgtcaacagcgcttcttttaatgctggcgcagctaactgattacgattaggaatatagccctctaagcccgatgtgtgggtcaagaggtgcaaaaccgtcacccgtcgatctttaaacgctggtaaaatgctgtgaaccttggtcgtaagtgacaggcgtccccgctctaacaaacggagaatcaacgtcgtcgtcccaatcaccttcgtcaaagacgctaaatcgtataattgtcctggttctaacgggattagtttaggcgtcagttctgaataacccaggaccttagtcgtcacttgctggccttcaatcacagcatatgaaacacctggtacaacctcatcagccactaacgcctcaatttggtgaatcgtttgttcaaatcgcatctcaaaacctcctatttgaatcaatactattagtatacgccatctaaaaaaagacaccaccagtttaacctgatgatgtcctttatttaaaaccaatttaaatctcgacgttccctgagaattggctgttatatagatcagcgtaaaagccgtcttgaaccatcaattcatcatgtgtgccggtttccataattgaaccgtgattcatcacaatgatattatccgcatcccgaatcgttgataaacgatgggcaacaacgaaactcgttcgattttgtaatagccgttccattgcgtgttggatatgaatttcagtccgcgtatcaaccgaactagttgcttcatccaagattaagatatctggatcggccacaaaggcccgggcaatcgtcaataattgccgttgaccttgtgaaatattggaagcttcttcattcaagactgtgttataaccttccggtaattgacgaacaaagccgtcaacatgggccgctttagcagctgccaaaattgcttcgtcagaagctgattcattaccatatttcaagttatcccaaatcgtcccggtgaatagccaagtatcttgcagaaccatcgcaaaatgacgccgtaattcttcacgactcatgtcacgggtatcaacaccttttaatttaatcgaaccgccactaacatcgtagaagcgttcaagtaaattaataatagttgtcttaccagccccggtaggaccaacaatcgcgatcatttggcccggtttaacttgtaaattatagtccgtcaataaaagatccttgccttggtaaccaaattcaacatgttccatttctaattggttggcatcatcttgcaccactgggacagttgaaggttcttcagacatatcttcttcatctaaaacagcaaaaacccgttcagctgaagcaatcgttgattgaattgtgtttgccaagttagccaattgtgagattggttgtgagaattgttgtgtatattgcatgaaagcttgcatgtcccctaatgtgacttgaccgtgtgagacgcgaatcccaccgataatcgccacgaagacgtaccctaagttattgacgaaagtcatcaatggcatgatcacaccagagataaattgggctttccaagcagctttatacaacttttcattttgttcttcaaatgtatcaatcgtcacttgttcccggttaaaggtcttcaagaccacttgacccgaaaagttttcttcgatttgattatttaataagcctaaactcttttgttgtgcagcaaagaatttttgcgacttaggtgcgacaatcccaatgacaattaaactcaacggaattgtgaccaaagcgatcagcgttaattgccaactgatcgtcagcatcatccataaaacaccgataaacgttaccgtgctggtcaccatttgcgttaaactttgttgtagcgtgctggcaatattatccatatcattaatcgcacgactcatgatatccccgtttgaatgggtatcgtaataattgattggcacccgttgcatcttatctttcaattccttacgcaattcatagacggtttgttgtgaaatccgcgtcataataaattgttgtaagaaactgaagacggctgaagcaagatacatcaagatcaccgtcatgataatgtgttgaatcttatcgaaatcaattggtaagcgatccattgcaatcccagctttttgcatggcattgcctttcatcacccctttaaagatttcagttgttgcttcccctaaaactttgggcgttctaatttggaaaataacggagacaatcgccaaaacaatgacaaatactaaggcaattaaacggctcgacatgtatttcaataaacgattagttgtgccccagaaattcttaggcttttcaacgacgccacccatgccgcgacctggaccgtgaccaccttgtggccggtttgttgctgctttttctgccattaggcttcatccccctctctgatttgtgaattgataatttcttggtaagttgcatttgttgcctttaattgggcatgcgtgcctttaccaaccatttggccttcatctaagaccaagattgtatcggcatcagccaccgttgagacccgttgtccaacaatgacgacgacactcttttgaatttcagtatcttccttcaaggctttgcgtaaaagggcatccgtcttgaaatctaaagctgaaaatgaatcatcaaagacataaaccgatgcgcgtttaactaatgctcgggcaatcgctaatcgttgacgttgaccacctgagaagttaccgccaccttgttcaacgtgactgtctaagccaccatcaagttcgctaacgaaatccttcgattgggcaatttcaagtgcatgccaaatctgatcatcagttgcatccggattcccatattgcatattttcgcgaatcgtccctgtaaaaagattggctttttgcggtacaaatgcgacttgttcatgaatatcatgcaatgtcacatctttgacatttaacccatcaacttggacttggccggcttcaacgtcgtaaaaatgcggaatcaagttaaccaaggttgatttacctgaaccagtccccccgataatcgcaacggtttgaccagcagatgcttggaaatcaatcttctctaaggctaatttttctgcattttggtagcggaagttaacattatcgaaggccaagctgacagtttgatctgtaaaactcttgggattttctggattttcaattggtgtttgtaaatccaagacttcattaatccgaacggctgatgcttgtgcccgtggaatgaagacgaaaaccattgaaagcatcatgaaactcattaagatttgcatcgcataagtcatgaaggctaataagttccccacttgcatggcttgatcagcaattaagtgaccacccatccaagtgattgcaatgtttgtcccactcataatcaatgtcatcacaggtaacatgacagacatgatactgtagacctttttagcattttgtgtgtaatctaagttcgcatcgtcaaaacgttcctgttcgaacttatcgcgacggaatgcacggattacccgcacccctgttaagccttcacggaaaactaagttaatccggtcagtcttcttttgcatcgctttgaaaagcggtacggcaaagtacatcacgacaccgataaagattgccatcaatggtaagacaacaacgaagattgacgttaattgcgcgttcttttggtaagccaagaagctggcaccaatcaacatgataggggccatgatcatcattcgtaagaacatcattgccacattttgaatttgaacaacatcattggttgtccgtgtaatcagtgacgaggtccccacttggtccatttcatcgtgtgagaaattgatgacctttcgataaatatctgatcgtaatttctgacccagaccttgtgatgtcttagcggctaaataaacgttacagattgcggctaggatactgatcaatgaaaagccgagcattttgaagccggcttgccagatataatcaatatcacctttggcaatcccgttattgacaatatcagacgtcaaattagggagatacaagttactgacaacttgaatcaccatgaataagacagcaccgaaaacggctaagcccgacattctcttttttgcaagtttaatcatgcgttttgttccttctttctattctacttatcttgaacgctcgcgccggtttctaaccaaccagtgactaattcgaagtgttcgtagatttgttctattgttaaggcttgctcagtatcacgatttaaataataggaagcaatgctttgaaaaacgttattcattaattgatggaggagcaatctaacagcattcggctgcgttttatcaattttcaacaaactaaaatcaacgtgatccattaaaaactgaaagccctccgtttgatgcgcatgcatcaattcgggcgacatcttgcgccgatttttgaaatccatgtgtaaaaataagtgccgatagaactgtgcattctcaccattaatggcttcattcgccattgccttgaagaaaatgcgaatcgtcttgaaaagatcacccttggtatctaataagagctgttccaaatcctgtttagaactatcacgcagcaaactgaggtcgtaaaagaaaatatcagccttatcttcaaagtactgatagaaactaccccgtggaatttcagcagctttaataatgttgctaactgatgcttcattaaaaggaacccgtgaaaattcggcatgggcggcctttaataaccgttgctgtttttctgccggcaaccggaaaaaagtttttttaggcatgcattaagactccttccaactaaaaatgacataccgtcgtaaaatatgacgttctgtcattttagcactgattttaattggatgcaatactaagttatcgtcataattgatgcaatatcactcgctagccgttattgtctaacgtcacaattaatcctataatagaaatactattgttaaaaactaattttgtggggcatatatatgaagttactcaaacgtttttacaccattaccatcgccgtactcgccatcatctcaattatcttcgtcctattagactacagcagtctcatcgatctaacgactgcaccctacctaaccatcgataacacgattttaattatttttacggtcgattatttcgtgcgtctttggtttgctactgataaacgccgcttttttaagacaaatatctttgatctgcttgcaatcatcccactaagcactcttttttcatttttccgactcgggcgcctatttcgcattgctgggttaatgaaagttttccgttttacgcgcttggtgggcttaacggggaaattacaacgccattccaagaaatttcttaagcaaaatggtctgctctatctgacttatgtcagtgccgccgtattaatcatcgcttccgttttatacgcactcgccgaaaaggcaacccttgccgattcattctggtgggcgattgcgaccgccacaacggttggctacggtgatatctcaccgcacacgctaatcggtcgtatcgcagcaattatgctgatgtcagttggcattggctttatcggtacactcaccagttcaattaccagttacttcactcaagataccgacgacaaactagacgaaatccttaagaagctcgatcatctcgaacaagaaaacaaaacgctcaaggcactttatcacgacaaggaatctgaatcaaaataattaatataaattaaaaaaatacgataataatcaccagatagcggctttaagccttttaattagttatttatagcactggtaattacaataaattgtaaacaactaaaaaaggttggctaaacaagaaataattgtttaaccaacctttttaattttgagcataaaaaaacctcgcataagcgaggtttaaaacattattaaagtttaacgatgtttgttgcttgaggaccgcggtcgctgtcttcaacatcaaatgatactgcttggccttcgtctaatgacttgtaaccgtcaccttggatagctgagaaatgagcaaatacgtctttgccatcttcaccagtaataaaaccaaaacccttgtctgcgttaaaccattttactgtaccgttgttcataataatttcctcctaatacatatacatgtacgttttgttgcaataaataatgataaataaacgctgattagagttatgaaattcaaaacttaaattacgcttcaatattgattacttgtttataataccatataaattattaaatagcaaaaaaagaattttttttattgataatctcactaatatgctatgatagccacatggaggtggcgcgtattaaacatttcaaacacattatctgttttatcttgcttttaatcatgcaacaaatcccccttttattagtaggtagcttagctgccctaccaaaggcacagcgaacgacgcatttaattttaattgtcgggtggctctttttaattctaaccattgggatcaccattttaatgtggtatctttaccaaaaagtaaaagggccgcaatatcataatcatttttcaaaagcccactggcgtgcaattctaattggatttgtcgccatgctagtgattaataatttgacggtgccctttatgcagaaaacaggaaacgccaatgtcgatggcctcgttcaaatttttgccgtcctcggtattttcatgttgccctataccttaatcttagggccaatgatggaagaattacttttccgtggtttcttaatgaattggttcttcgttaaatcacctattctaaacattatgacgagcgctctattattcggtctcgtacacgtttcaactgatccgatctatttcatttccaaagcactactcggattagtcttagcaatcgtttattatcgcacaaaaaccattaagagtagtatcatattacatgtcttaaacaatctctcagcaggactaactattttttaatcattgaaaggaattcgcctatgtctactttaacaactattttaacctatatccaagaaaatcctgaaacagtgacgttagaaccgttccaatatgctaacgttatccgctttggcatcgatgatcaggtccaactaccagatgttgaaaaactattcccagacatgcggctccacgttaaccgtatcgattcagactatgttaatgcccaccgtgacttattagaagctttttaccaacaaacaatagagaaacaaaaagacggctttcaagatgtctggatcacaaccacccatctttccgaccgtcatattttcctagtggatctttcttttgaataacccacaatttcaagcattaaaggttgaattcgttaaatacgcaattttaaccctcttcttattcgttatgcgggcctttattgcgcacccgattatcattattgccagttggctcagcaccctcgtttgcgtaggctattttgtcgcactggtgatgacttatcactaccgttaacggctcatttttttcgtttcagcgattacttcttcagtgaagtataactgtaatgcaaagaaaattgccagcaatgctgcggctaaccaggctgcacggacattaatgactttgactaagaaaccagaaccaatcgttccgataaagaagctaccaacaattagcccaaaatacttggctttttgttggtattttttttccttcgtggcaataaataaataacaattttcaactaacttccggtaattaccggtcgtaaaggtattggcatatggataaccattaaccgttgaataactggctagttgggttgccatcgacatcgataacatcgtcgtaacaatcatattagggacagcagtacttaaaaacccaacaataattaaaacaatgatttgcaatgcgagtaaccataaacgccaaatattcaagcgtgccgtgttaaagtggcgccgagccaattgcacaataatgaccccaattccaaaagcgatgattggcataatcttttcaggtaattgtgaccattgattagtagcgatatcaacaccgataaacacaatattacccgtttgcgcactagcaaacacgccacctcgtagaatcacacaataagcatctaaaaaaccaccgataaaggttaaaaacatggctgttcctaaccggtcgtgaaaattaattttcttttgcaagacaaaccctccaactcaatacttctattatacgcaaaaaaagaaccgtgacaaaataaatttagtcccggttcttttctagtttatagattgattagattagaatcttgatcatgaacgacttctcggaaagccatcaaaccttgatcaaggccccgcaataacacctccgcagtgccaatattagtggcaagtggcacttcgtaaacgtcagacaaccgaatgagcgcattaacatccggttcgtgtggttgggccgtcaatggatctcgtaagaaaataacaaggtccattttattttcagaaattaaagcgccaatttgttgatcgccacccaacggaccagacttaaagcgtttaacggataaacccgttgcatcaataattttctgaccagttgtccccgtcgcaaaaagttcatgttgggccaaaataggctggtaagctgttgctaatttaacgattaacggtttttgacgatcgtgtgcaattaatgcaattttcataagaaagcctcctaatgtcttctatgtttaaccactgtgaaaaagcggagtacgctcgcaagtaagataaaaaaaatcaatacaaacgaaacgtaattcgcccaaaactgggttactggtaacacaatattaacgagccgttgcaataacatggtaatcaatgtggcacaagcaaccatgccaaataactgtccataacgtttcacggtatcatccgtcctttttgctttatgctgaaggctagcaccaatttactgacactcagtgcgtttcttcataggtagtgtctttagcccaaacgagttagtttgaacaacttctcgaatcttcagcagtccggctgcactaagcaccttatcaaaagttctgaaggtcccatcagtcataccggtcacaaactcttccaaaccactcgcatagcaactactaatagtcacgtaactttttcctttaaaacgatctggcaaagcgtctcctacgtgattaaagcgtactaggcggcctcgcatacaatctaagaagtttttcatgacaccagacatcgcgccccaataagtaggcgcaactaatacccacacatcagctgctaacaattgttgttcaagttgatctaacaccggatttggttgccccgtgtccggtaaaatttggaaatcgtttagaaaaatagttgagacatcatcttcgggacccacacctgctaaaacggcttgtaatagctgaccattaacgccatcgcgttggtgactacctaatattcctaatactttcatgcccaaaactccaaacttttaaattaattctagtgtacactttttaagcaggggttgccaacataaataaagcgctttattaatagtgtaaaaaaaagtaacggcgtcagccactgctttttagtttaaactattttatcttaataccaaccgtttgctaaccagaagctctttgcgccttcccatgaaccataacggcttgttacatattgatctgcaacgcgttcttggttacttgctgagtagtcaccatttaagtatgagcttgataattggtaacgaccaacgaattgaccgttacttgctgagtatgaaccacctgattctttgttggcaatccattctttagctgagttagttgttgatgttgttgtgtttgtagttgtcgtagtagtcgttgtttgttgttgtttaacaactggcgttgttgttgcttgttgttgaacgggttgtgtttgtgttgctgctttttgaacaggttgttgtgtagcaacaggtgttgttgtcgcttgtgttgtttgttgtgttgccactggtgttgttgtagctgcttgtgttgtagcaggtgctaccgtaacagtttgtgtttcttcgtcgattgttaatgtttcgccaacatagattaagttcttgttagcaattttattagcgttagcgattttttcgatcaagctgccgttaccagcaaatttttgtgagattgatgataatgtatcaccgctgacaaccgtgtagttcgtagctgcatcggcatggccgttacttgcgaataaaagacctgcagttgcggcagttgataatgtagcgctgaataaaagtgttttaagtgatttcatattgtgtatttatctccttgttgtttcaaaagtttatttaatgtcgtattaataacgtgacattaatataccatctaaaaatcatttgtaagtatcaaacaagtaacaattgatgacaatcctgtaacaaaacaaccgattaacgacctaatctgtaatattgtcccttgcgatgactggtaatataggatttacaatccattgaaaatgacgcaaaaaaaaggctgttttatctataaattaccgaaaatatctttatttttcattttaaatccaaaaaaattgtcaatctgacatcatttactgatacttttaaatattatttaccgatattaaacactaaattaaccaatcacattgattaaaagctacttatttttccaaaaaaatgggcataaaaactgaacacttaagtgattatcataggttacacaaatcagaacgttaatactaacgaccgcgtaacccttgatggttaacaagaataggtgcagtttctgtcactaaaaaaataaaacctacaaaaaaagagctattaaactttagtttaatagctctttccattctaggatgttatcaatatcacccgtacggggatcgaacccgtaactccgccttgagagggcgacgtcttaaccaatttgaccaacgggcaataattggaacacctaatatattagcgaataacacccgtaatgtcaattattaattaaactagataaaaatcttatagttccggtggttaatagtaatcgattcctttgtgactttacgattggttttgcgcttgagattctgcagaatattcaatgcatagtcacgatgctgttcaattaaggccaacacatcattttcaatcgataactccaatagtttacgtgaatcttgtaattgaatatgaacttggttctgatcttgggaaatcacctttccctgaaataacttttcaacatctactttattcatatcgatagcctcccatatcagtatagtcctttttactggttttgttaaaaatcagaattgacaagcgttagggcatgcagtatcatagtattcgttgataacattgggtattcgccaaattggtaaggcaccggactctgaatccggaatttataggttcgagccctatatacccaattgtattttcgctaagtctgagaaatcaggctttttttgtgtgtttaaatcattttattctcttaattgcgtaaattccttctatataaatagcttttttgttaactactatctgattggccacccaaccagtaattcgacccgttatcggtgccaaaatctgaccatcccggttgcgctgtgctaggtccaccgtgaccatcgtctttttaataatcgcctcgttgattacctcactagtctgtttagcagacatcttagcaagatgtgttcggtgcaactgcacgtcagcgatgctcgcttccttggcacgtaccgatgtatgatcacttagataaaacccctgccacttcatcatgccccgatcgtgataatcatgtttcagaaattgcgtcactagtttgttatcaaaacgtttagtcataagcattgccgcccgcatgaccaccaacaagtccggcccgttcaatcgcggttgcacccttatccttacttgataatttaaccaaagacgcaaaaccaaacttctgtcgaatttcgtcaaccgtttgatctaattgatgttgctttaaatgacgcaattgcggatcgaataaatccaactgttgcacgtcatcgtcaatcaattggccacaagtcagactaatatggcgaatggtctgatgttgccactgctctcgaaataattgaatcgctgttgtggtaatttcatgattaccattagtcggttcaattttcaatgatcgtccaaatcccgaatggacaccactttcattttcagaaaaagaaaagccaatccccaaactaatcatacacgcctgtttacgatgcgcacgtaaccgcgcagcaacctgttcagcgatttctctgataaccacttcaatttccgtttgtaaaaaataatcacgtggtagtacctgactattcccatagaagcgctctttgggcgtgtatttttgatggacaattgcgcgatcaatcccccagctaaacgcaaataattggctgccaataatccccatcttttgttttaaatcatatggattagtatgcgctaagtcccccatcgaatgaatctgtaattgatttaacttcgtcgccgtccgctgacctattgaccagacacgcgctaaatccgttacgggccacagcttatcaggcacatcttcatagtgccactccgcaattaaactgtgattatgtttagcttccaagtccaaagcaagtttagcaagcaacgggttatcgcctatgccgactgtcaaataaatccccgtttcttttttcaccgtcagttgaatctggcgtgctacttcataaggcgtttgaccaaaaagatgccaactcgtcgttatatctaacaatgattcatcaatcgaatacggttggatgtcttcttctgccgtgaatctttgaaaaatacgattaatttttaaattttcttctatataaaggttcatccgtggttccgcaacaatcagccttttatcatggaccggtacttgagtcgctcgggtcacattactgataccaaaaagttgtttagctcgtggactagctgccagcaccaagccactgccagcgtttttggcagttgacatcaccaccaaaatcgattttaacggatttagccctctcttaactgattctacagaagcgtaaaatgatttggaatcaatcattaatataattcgtcgcggttcatcagtataatcatacattactcactcaccgcatttctaacgtagtacttatcaatcacgagttggcttctacaattatagtgtccaaaaacggcaatgtgcgcattctgctccgcgacatacattaaattaaaagcatccttggcaaccaagcaattataattttgagtggttgtttgtaatgtaaaccgaactaagtacggatcaaacgaaataacttttattgtactgccaatcgttccttgaagactaacgtactgcataattatcccaccttctcacttatacaatgcccttggttaaagtttggatctgttgcacttgctggtctaattgactttgccagcgatttatttcaattaaagtgacttgtggtaaatgttgtccaataaattgcggaaatttactacgattgtagtaatagttcatggcatctcgtaaatcgcttgattggcctgcttgttgtcgtaactctaagacgccaaaaccatttaaatataaacttaaattctgttgttgcaaatcaattatgactcgacttgtttgcatcaagatcacctcaatcatctgttctcttgttacattataagaacgtacattcgcattagtcaagtttaatttaattttaaccataaaaaaagcagcggcgtcagccactgctttttagtttaaactattttatcttaataccaaccgtttgctaaccagaagctctttgcgccttcccatgaaccataacggcttgttacatattgatctgcaacgcgttcttggttacttgctgagtagtcaccatttaagtatgagcttgataattggtaacgaccaacgaattgaccgttacttgctgagtatgaaccacctgattctttgttggcaatccattctttagctgagttagttgttgatgttgttgtgtttgtagttgtcgtagtagtcgttgtttgttgttgtttaacaactggcgttgttgttgcttgttgttgaacgggttgtgtttgtgttgctgctttttgaacaggttgttgtgtagcaacaggtgttgttgtcgcttgtgttgtttgttgtgttgccactggtgttgttgtagctgcttgtgttgtagcaggtgctaccgtaacagtttgtgtttcttcgtcgattgttaatgtttcgccaacatagattaagttcttgttagcaattttattagcgttagcgattttttcgatcaagctgccgttaccagcaaatttttgtgagattgatgataatgtatcaccgctgacaaccgtgtagttcgtagctgcatcggcatggccgttacttgcgaataaaagacctgcagttgcggcagttgataatgtagcgctgaataaaagtgttttaagtgatttcatattgtgtatttatctccttgttgtttcaaaagtttatttaatgtcgtattaataacgtgacattaatataccatctaaaaatcatttgtaagtatcaaacaagtaacaattgatgacaatcctgtaacaaaacaaccgattaacgacctaatctgtaatattgtaccttacgatgactggtaatataggattcttatccaacaaaaaaacgacttaaaaaagtcgtttttttgcttgtttttttaagattcttcttgtcgacgcttcaaatggtacttattaattgctttttggcgtcctaaaactaacggaattcgttcgacaaagacatcactatactctaatccaaaccaagatgctggcgtatctgtaaacttctctaaccataaacgaatttgaacaatgactttgtccattgctctaatttgtgtttcaggtgataagtcctcttgaatgatcacaaacgagaaatcaccaacttctcgattaggaattgtcgtgtaatgttgtggttgtgctggtaattcaccattatgaatcatttcatggatgatttggcgaataaagatatttactttttgttccatcttaaagcctaaatacaattggacactgacaatgtaatccgtacctaatgtatcaaccgtgtactctgcagtgtaaggctcatctgtcacattcacagcaacaaaccaataaacctgagcacgcttaggccgtttatccaatattgaatagaggatattctttttcaccatattcttgccccggggttctgcctgaggttttgaaagataaactaagtttgttgtatacaatggtaatgacgtttcattccgtaggtcatgtagttggcgtttatacgctaatagtgacactgtacttgatttaaaggtattactttccttaatcgaattactccgataccaaacaaacatgatgaataaaatgacaaaggcgattaaaactgtcacataaccaccatgcataaatttagcggcacttgcaataaagaaaatcgtctcaattgcgccaaagaatagtaatacgacataagccaagaaccaccgcttctcgcgtcgtcccaaataatggaacaagagaatcgtcgtcattaacattgtaatcgtaattgctaaaccgtaggctgcttccatatgagctgagttcttaaaatagaaaacaaccgctaaacaaactgcccataagatccagttcacaattgaaatatagagttgcccttttaatttagcgggataatcaactttaatccgtggcaataaccgtaacttaatcgcttcagaaactaacgtataggatccagaaattagagcttgcgacgcaataattgcggccactgtcgctaaaagaatcgctggaattttcaattgtgccggcattgcttcaaagaatggattgaaatctgtcatattttgataagcggcaacttctttgtgctgtaataaccaaacaccctgtccaaaataattaaggaccaaacaagcggcaatataaggccagctaccatagatattatgccggccaacgtgacccatgtcagaatagagcgcttcggcaccagtggttgccaagaagacactacctaatattagaatcccaaccttattttcaggactaaataggagatgaattgcgtagtaaggattcaatgctttaagcattgttaaatcccccattaaattcataacgccaatcgcaccaataaatgtaaaccaaatcaacataattggcccgaatgatttaccaatcaaatcggttccgaacttctgaataaaaaagagtactgataaaattgtgacagttaaaataatcacttcacgttggttggaaaccaaaacattgccattaatcggcaatcccttcagtccttcaatcgcagttgtgaccgtcacagctggcgtcaacatcccgtcagctaataacgtcgccccgccaataatcgctggtatcacgagccacttagcttgtttacggattaacgtatacaatgcaaaaataccaccttcaccgttgttatcggcgcgcagcgcgattaatacatatttaaccgttgtcattaacatcaatgtccagaaaacaagtgagatgctccccaccacaaaatcctgactaatattacgaataccgccattgccctcgacaatggacttcatcacgtacaatggtgatgtcccaatatcgccatagacaacgcccatcgtaattaacatgccagcgattgacaatttttgccgggttgttttcttttctgttgccaatttcatcttcttacttcctttacttagatattagcattatcgtagcttgttctaggcggaatgtctagttatatctataatttctagttgttagtctccaactttattaaagatggtgtttcatgctataatagatacactgaaataaaagaggtacattaatatgaaagataaagatcaaaagaaactcgaaatcgctaagaaacagtataaaaagctagctaatcgcccccttgctaaggaacgtaaaaaagcagttgggacatcttctatttatctgtttgtcgttgttgcggtaattttaattgcgctagccatttttcttaaacagcgttaaatcaaaaaaggttgctgaagcaacctttttttgattgaatgttttttatttaccgtctataatgaagtagttcactcttttaagcttaactgcttatctaaaacacgaacattatccagaaaggcggctcttatgtctaccaacaaaaaaatctatctcgcaggtcctttttttagtcctgaacaaatcgaaagactcgacaaagttgcggctctcctagcgcaaaatccaacagttgagaccgaaagtattttccgccccaatcaacatagctattcagaagctgaatttggtagttttgaatggcaaaccgctactttcggatttgatattcgccaaattgatcaagctgatctcgttgtagcagtattagactatcaaacagaatcaggtcaatttgaacccgactcaggaacgatgtgggaatgcggttatgcttttgcccataacaaacccgttgttttagcacgttataaagatgatttaccgattaacttaatgttatccggtagtgcgacagctgtcttcaacggcgatgcagatcttactaatctagcaacttacgactttaacgcgcttcaaactaaatacgttgcaactaaaattttttaattagaacccattattttccgttaattgacgataccaatgaccacttttcttcatagtccgttgtgcattatgctccagatcaacccggaagaaaccatagcgatttctaaacccgtttaaccaagaccaacaatcattaaacgtccaagtatggtagccaaagcaactactaccatctgcaatcgctcggtgtaattggcgtaaatgttcctgcataaattcaatccgatagtcatcttgaatctcaccgtctgcagccataaaccgttcttcatctgcgacacccatgccgttttcagaaacataccatggaatattctggtagtcgttcttcatcatcatcgcaacatcatacaaggcttctggatagatttcccagccacgatatggattaattcgccgttctggccagacgtaattctcatagaggtcatcggtcgtcaacgccgggaagtgtggattggttggtgcctgtactcgcaatggttggtaataattaacaccaatgaaatcaacacggttagccgctaataaatctcggtcaccgacttcagtaacaggcgtcaattggtgttccgccaacaacgttatcaaagcaggtggcacctggcctaaaactgttggttctaagaaactcttagccaaaagtaaatccgctttttctttagctgccaagtctgctggcgcatcactcttcgcataagctggtgtaatattgagaataattccaatttgaccgtctggttttacttttctaaattcagtaaccgccgcagcgtgtgccaacaaagtatggtagccaacttgaactgccttcttgaaatcaatgatgtctggataatggtaacccgttaaataaccacattcaatatgaacgattggttcattaaaagtcgtccaacggtccaccaaatcaccaaataattcaaatgctgttttggcatatcgcgcaaaggccattactgattctcggttttcccatccacccttttccattaaccaccaaggcatgtcaaaatggaataaattgatgattggtgtaatattagcagccttcaaacgttcaaaataatctcggtaaaaagcgaccgcttccggattaacatgttccccgtctggcattaggcgggtccaagcaattgaggtcctgaatgaattcaaaccaatcttttgcatattttgaacgtcttctttgtacaatcggtaagtgtcactggctgaatcggggccctggtcgccattaaacttctcagggtgcatttcaaaccatttgtcccatgttgaggccgacttaccataattaagcgcatagccttctgattggggtgctgacgtggctgcgccccacataaaatattccggaaatttgatcattgactcttctcctttaaaatgtaatcggcatcatttgttataactttattgtagcatgccttgttttaagtttcactaaataactaatcgctaatcaggcgggtttgcaatcgctgtcattgacttattttaccatttatcattattttttatacattttttatgttttatgcgtaatttactttaaatttagtagtatttatgatacaatttagcaagaatgattaatactcccccaagtaagatcatttcgatactcataagatacccgatttactctcttccccaattagagtttaagtcgggtatttttgtgtaaaaaaaatagccctcacggactatttgttaattatgcaaaaataaattgatagattcctgcaccacagattgcgccgataattggtgcaacgactggtacccaagcataactccattgtgagtcacctttgttcttaagtggtgtcaacatgtgcaccaaacgtgggcctaaatcacgagctgggttcaaagcaggaccagttgggccacctaatgaagcaaccaatgtcataactaataaaccaacaacgatgtgtccggcagcgccaaacttaccagcaccaattgctaaagcaccgaaaactaagataagtgtcccaaggaattcatttacaaaaccattcatacggctatgagcagcatcaattgtaacgaatgagcctaaaataccttcttggtttgttgtacgatcataatatggtttgtaagctgcaaccaataataattgaccaaccattgcgcctaagaattgaacaatgatatatggtaagacattttcccatggaaataagcccatcactgcaaaactcaatgtcacagctggattaagatgattaccagaaatgctaccaaacataacagcgggaatcataaccccacatccatatccaaaagcgattaagaaccaatcactactaaaaccttttgttccctttaattcaacgttggctactgccccgttaccaaaaataatcataattgcagttccaataaattcggcagccaaacgggttgtcaaagaagcatccactactatttcctcctaatgttaacataagtatatatcacatgatacgtgataattttcagaaaaacaattagcttttctaattaaagcccttttatgaaaaaatttgtccttttttcacattattctattaaaaataacttgctcaaattgtgtaaaatgggataatattcattggttaaccacattaacgctgattatctaattggaggtcactttatgaacttaatgttagccgttattctctatttcggcttagccatctttggattgggcttattactactcttgttccttcttatctttaaaaaaagcattaaagccgcgttggttattgccttaatcgggttgcttgttgcggccgcaccggttggttatcaatactacctctcccaaaaagccgcgcatgaagcacaagttaaacttgaaaaacgtgagaaaagctttaataaacatgaacgtcaatttttaaaacatatcaagcaagcaacagcttccacagaatatgttgcccaaaaatacactgctacttgggaaacactgattaaagacggttccgttacaatcggtgattcaacttatactgataacgaaaatgcaatcgctggtgaagggcgtcgtctagttgctaagggcaagctcgatgatgctgataattattacgctattgcccaaactgattatgaaagcatgaaagactataagacaagtcataacaaagaacggcttgtctacgctaaaaacgttttggcaaagactaatgcttttatcttagctgcaacgcgtcctaacagtacgtatcaagattacgcagatgatatctataaaacaaataaaagtcatgtccgtgcgattgatcagttaaaaaatgcccgttcaaccgctattaattagcgaaactaaaatatcatttttcaattaggtgccaacagtttacgccattcaaataaaatgctggggagcattttatttttgaaactatggttaaccccgttacattttggagggtaaaaaaatgcgtcgaataacactagttagtttattagcaagtcttcttttactacttaccgcctgcggaaaccccgtagcggttaagcttcatgaaaatgggagcgggttcaatgcaaccgtgaccggtaaaaccaagcaaaaacgggtgtactggcaaattggcgatcaaacccattcagtcaaagtgactgatgggacttttgaagttgatattccctacaaagccaaagaatatcgtgtcacatttgccgataacgaacagcttaataatccaacatacttgcaaggtcctgctgcaacacctattacaaaatggtctactttcatcgcacgttacaatcctttagcacgccaaaaaaatttaggcgtttttgatgctaaagcgattgaaggtattcgctcggatcaaattgatgatcataatgttatctctatcaatgctagtgatggacaaatcttaggaatttccgttaaatcgctagatgcgaagaacaaccttgtctttaaaaactatttggaatctttcaccgctagcctgggcaccgacaacaagcaagttacaacgcttgtaaagcagtccttcaaccgtcccaataaacttttacaattaacaactaaaaagattcgctattcaatcattacaacaactaatcagaaacataaaatgacacaacttgccattacgcacgttgaatagggcaataaaaaagacctgaagctgacaatcttcaggtcttttttatttaattaaattatataagtagtttttaatttcgggagaaattattcataagttcagtataacccatcgccataattacgtaaacgatcggtcaagcacaacttaataccaccaaatcaaattagcagaaaaaactaatccattatgttatatttaagttattaagaaggaggtttttatcatgttagaatatcataatattttagttggattagacggttcagaattagctgataaggcgcttaaacaagcgatcgaagtggctaaacgtaatcatgccaaactttttattgctcagattattccagatgaagtctctgtcagcacaagcatcacatatccctcttcttctctagaggccgaacgaaaatcaacgaagctctacttagaagaaaaagccaaggaagccaaggatcaaggcgttgcagacgtccaaaccattttcaaggttggttcaccccgccgtgaattagccatcactatcccacaagaagccgatattgatttaaccattgtcggggttagtggtaaaggtgctattgaacgattgctcattggttcagtggcccaatttatcagtattcattcgaccacaaatgtcttgttggttaaataaggcgaacgaggctttaaaattcggtaaagattgtcatactcgttaaagcgcccccaagaccgtttcattcgtatttaacatttatcaagcattgttattgaccaattctattaacaaagtactcttttttacgcaccattggccgacgataattgattattgattgttaataacacccttgctaatgttaataattgttatataatgaaggctaaatcccctcttaacaactatatttcaagtaaggagtgttatgtgtggcatttgatattactaaactttcggatcaacatcttaaggccgcctggcacaaacatcgaaaacaaatcttaacgacattagtgcatcctaccacctggttcgatcaaattaatcacctcttgatggcctttttcaaataattaataagcgtctagtcttaaacaaaattttgtttagcactaggcgctttacttttgcgctcatcaatggttgtcccccatacaaaatggtatactgctatataagaagtctttataatattggaagcgaggcttttttatgattgctgtcttattagttgtttgcgaaatttttattagtacggcccttattttctggaccaagcacacttggaatttacccgtccttttaatgggcggcgggctcatcctactagcccttctcacacaaatgtggtggcaagttctgtgtatcagtttgctgataactggctttgaactactcgccagccactatcatctatagcaaggagtactgattattgaaactaaaaaagaagcaccgtctaagattattagggatactactgatggctggcattggcctgttgatggtccaagcgcagtttggtaagcccctattaaaaatacaaaatgcccaatccgcacaagatatcactaaaaaacctaaaaaagtcctgttagatatcgcacccatttctcaatttccagaattaccaactggctgcgaaatcacggccgtcgcaatgctgatgacttataaagatatcgacttacccaaaacagctatcccagaattgattccctacacaaccactggcgatatggagaccggtttttggggtaacccatttgatgattccggttataccatgtacccacctgcttgggccgatttattcgatcaatatctaggcagcttcaccgatctttctaatgcatccgtatcgaccttaaaaaagacacttgatcataaaaaaccaatcgtcgcgtggattaattatcacgggcaacctgctcattccgttttaatcgtcggttatgaccaagagcacttctattttaatgatccttacacagggaaacgcaaaaaaatgacatttaaggccttctggaagattgcaagttaccaaggccaccgggcaatgacttattaagtttaattgggggaatttatcatgtttaagcaccaaacactaacactattattcggcactagtcttttattactaacagcttgccaagcaaaacaacctagtacgcactcagtggcatcatcctcagctcaacaaagctcacaggttgctcattcaaaatcatcttctgcagaaatggtttctaaaaccactacttcttcagcaacaactagccataccgttcaagaaacgactcacacttatactgatagtcaaaaagcagcaatcacccatgatttcttagagtgggccggtcaacgtgctgaagttggtaatatggctgttagtgactggtactttgaccacggggctgacgatcctggtgattggtttgccgaaacaccggatggccgtgttttagtccaacatggtgaaggtgacgggcgccactaccccattcaagcagttggtggttgtgttttttacaccgcattagatggcacgactggtatcgattcacaattatacgattcctacgccagaaattatgctagcaatatgaatatgaaccgcccgattagtaagtatttattaggtgataacggtgtcgtttacgaactcaaaacgggaaatgggcaaaccacaaatacggaagatggttttgcattagccccctttagtggtagccgaaatacgtcccctacaccatttaccgtttcacaggatacggctgcgcaacaagaattaaaatcgttgttagctgcctattagacacattttaaggagaattcaatgaataatgccgctttattagaatacctcgaagcaaactcccgcgctctcgatacctttcgcgataagagcctcgattatcaaaatgaaaaaaatatgaagcgtcaacctgccaaacgttggaatgaagctaaggttgatcgtgctgtcgataagatggtcgccgaattcatcgccagtatccaacaaaagatggcttttaacattcggggtgagcatgttgatgactatcaaacttgggttgatttcatcgaacaaaatgaggtcctagaaggccttgaagaatcagtcaatgaaatgacatttgaataatatagataaattaaagtcgggtcaagcatcaatttggcctgactctttttttatacactaaaaaagcgactaaaaattaattttagtcgctttctttaaaacgaaatactatcaattataggcgttcgtttaattctttaccaagttcttcgaagccaggtttgcctaataaagcaaacatgttcttcttgtaagcttcaacaccaggttggttgaatgggttaatgccgttcaagtaacctgaaattgaaactgccatttcgaagaagtaaatcatgtagcctaatgtataagctgtttggtcaggaatattaacggtcataacaggtacgccaccatcagtatgtgctaaaacaacaccctggtaagctttcttgttaacgaagtccattgtatggccttctaagtaacctaaaccatctaagttttgttcgtcagctgggatgtcaatgtcgctgttaggtttttcaacgttaacaacagtttccatcaagttacgacgaccttcttggatgtattgacctaatgaatgtaagtcagttgagaagttagcgcttgaaggatagatccctttttggtctttaccttcagattcgcccatcaattgcttccaccattctgagaagtattgcaatgttggttcgtagttttctaataattcagttgtgtaacccttacggtataagatgttacgtaatgcagcatatttgtatgcatcattcttagtaacgtctgtatctgtatattctaagcgtgcgtcagcggcacccttcattaattgatcaatatcgccaccagcaacggcaattggtaataaaccaacagctgttaatactgagaaacgaccaccgatatcatcaggcacaacaaattctgcatagccttctgcatctgattcagtcttcaaagcacctttagcgcggtcagttgttgcgtagatccggcctttagcttcttctttaccatatttcttgattaacttatcttttaagacacggaaagcaattgaaggttccgttgttgtccctgattttgagataacgttgattgagaaatcgcggtcaccgatcaagttaactaagtctgataagtagcttgaactaattgagttcccagcgaataaaacttgtgggaaatcgcgttgttctgctggtaacatgttgtagaacgtgttgtttaagaaatcaattgcagctttagcgccgaggtatgaaccaccgataccaattgccacgaagatttctgaatcgctcttaatcttagcagcagcttctttaatccgtgcaaattcatctttatcgtaattaactggtaaatctaagaagccacggaaatcgttgcctgcgccagttccttcacgtaattgtgaatctgcagcattaaccattgcttgcatttctgcaagttcgtttgattgaacaaatttgtccaaacgtgatgcatcaaatgaaatatgtgccatagtagtctattcctcctgtttttaaaacacaagtatacttaataactttagcttttttaaaggtaaaatgcaagctagattgcccccttgatttagaaaagttgaatgatgtattaacggcattgccgggtgaaaatctgttaactgcattagaagaagaacgtggaaagggcagaaatgattatccagttcataccatgtggcgtgctttcgtagctagttttgtctttcaacatcgctctgtcgcttctttgattcgagagttgaagcggaatagccaactcagagaactatgcggatttcacctcatttttcgcgctcacaaaaaggcaagtatagggttcaactagctcccacagaagctgctttttctcgatttttaaaaaagttactgctccatcaacacctattagatgagatgtttactgaattggtcactactttatatgaaacactggatggatttgggcaaacgttagctttagatggaaaaatcatcccttcttatgctacaaaaccaaataaaaaagtagaacatgatggcagaagagatactgaagcagatttcacactaaaacaatataccactacgacagccaatggcgagaagataacaaagaagaaaacatggtttggttatcgacttcatttaatcgttgatgcaaattatgaattgtctgtagcctacgaagtgactaaagcatctgaaggcgaaccgacggtcgcaaaaagactgatcaaacaattttctacctcacaaacgaaacagtgtgactatcttctagctgacagaggatatgatggagctccattattaagtctcattgaatctaaaaacatcatccccgttattgatattaaaaaccagtgggataaagatacgctaacccaacaatatcgagatacagatttaatttatacgtataacggagcggtttcctatgtcgatgaaaaaggaaatgagataaagctagcgtatatgggacatgataagaaaacagattgtttacgttatggatttaaatctcaatatcaggataaccggcttttcagaataaaatgtgaagaagactgacgtatatttaacaaagtcgctagggatagttttaagttcaaacgaatctacaaaaagcgaacctctattgagcgagtaaatggacgaatcgatcgagattacctatttgagaatcatacgatacgaggaaaaaagaaactgaatctttttgtgacgatgacttttctcattatgttagcctttgcgaaagataagatcagtaaaaaccatctagcttatctaactgcttgggtagcttaatttttttaaaattagaagggatcgtttgtttgacgtacgcaaaaataaaagcggagtaaaaaaacagacacttttttacacaaaccatggaatgaactgactactttccgctattttacaaataaggaagcctacggcttatttcgatgctagttattttcacaaaaaatggtacaacgtaatttattctaaaagaaacttattttaaaagaataacagatggcggtttttcattatcttgaatatgaacaagattattctgggaaagtccgaatgctgggctattgaatagaaaccagttaaggcagtggtgtataggttctttttggacgcttaaaaaatgaactgttttatatggagtattctggaaggatattagtatagacccagtgagccagcctctttttcattttctaggtacctttctattaggcgcttacgttactctaacaattaccgttatcaatggaatttaaaaaagatgacccctattcaatataggaggcatcttcaagcagcttaatctctttttttattgtgtccttgacatggataccattttatcgggagctctctaccaaacttttatttttaaattattctttaaacaacaatgctttactatttggatacgtaggaaattggttcattggaacggtccagtcttgttcgggaatactaaagttatatttatttactaattggtcagaaaagacacgcatactgtgaagagtaatccattctcctgcacaacggtgcatatttctaaattctcctccaccttgcgcaatcatttcgtattcttcttcataagaaatttcttttgtttttccaatatatctcttgatatcaaatttttctggatgatcaatcgtacgagcgtcatggtttgtaccataaatatctaagacaacccagctatcttttggtatttcgtaaccatcaatttctacatcacgaagagcgattgctggtaacataggaaagaatggatagtagcgacgcatttcttgaataaaggaatcttgtagggtatcaaagtcttcttttaattggtcatacaagttcgttttactgaaaagcgcatgccccattaaggccatccaaaccgtcagtgctacagtaggacgaatgatgtttagcaattcaactgctgcaacctctactggtaataactctccttctaggtcttctgcttgtgcgaatgtatagagggcaaggttttctttgcctggtacaggatttttgcgagcttctttaattaatgattgagcccatccctctgattcgttacggtcttttactccttttaagtggttcgttggagaagtgatggctccgctaatcatggatatttgattactagcaagcttatcgatttctttcggatcatactgtgctagattaattccagcccattcacaaatagagttaaagagaactcttttagaaaggtcgaataactcaaaagtgccatgttgctgatcgagttcggttgcaagattttgatctagaatagctctatagtcttccatacgttctggagtcatcaaatccatgaaataatttttacgttgatggtgtttctttccatctatcgtctgtacgccgtcttcaccaaataaagttttcaatactacttttggcatagacccttcccgcttgaagttttcaggattataaaatttacgcgctgcttcttctccataaacggttgtaatttcttctgtcagaaattctgcttttgctactggagcatctgcttcttcacgaagctcacctaaaaggttataccctttattaatcaactcctttacatccgttagtttgatttttgtttctggtacttgtttcattatttcatctcctgtttgttttatttctaccaatacaaacgtactatcttaaacaactcagtgtcaaaaatactgctcactggctttttcacgcaagttttgctttcttttcagaatttattttcttaaaggccttgacttcattctggcaagccgctatacttttcaacatcaaataaaacggaggttactgaaaatgacaaacactcacttagtacaattgaatattcgttggcaaagccgctaagtgagattgtataccgtcgtgggatacagtcttttgattgtatccatgcggccattcatcagtaatcgattgaattttaagcctacatggattttactcgaggaaatccatgtaggctttttctgtcccctacatgactatgtgggggactttttttatttgagaaataagtgcgttcagcctggttatactttgaggagtagcctagtccagtgaatgaacgatgtaatcgttcgtttgcgggacgtacctaaccgcagaagtatgggctgaaaagcacgttaaaggagctttcgtcaatgtctaaactaaaacgttttttaccactcattttaattttcggtagtttactcacactgctaggtatcaaaaaaattaaagaagcccaccaacctgatttgccaaccgttggtattttacagcccttatcccatcccgcacttgacgaaatccaccgcggtattgtcgcaggtttagcgagtgccggctatcataatcatcaaaatattaaaattgattttcaaaacgcacaaaacgatcaaagtaacttgcgcctaatgagcaaccgctttgttacagaaaaggcaaaagttaccatcggcattgcaacaccagccgcccaaagccttgctaacgccactaaacaactgccaattatcctaggggccgtgactgatccagccagtgccaacctcgttcaaaataatcaacagcccggtgccaatatcaccggtgtttccgatcaagcacccattcaaaaacaactcgatttaatgcaagccatcatgccgcagcttaaaaccgttggtatcttatattccagcagtgataactcggcaaccagtcaaatgcatttattcaaacaactcgctgaacaaaaaggtctccaagtcgttgaggccagccttagttccgtcaacgatcttgaacaggtcagccaaaatctagcgcctaaagttgacgcaatttacgtaccgaccgataacacaattgccagtgcaatgggcacacttgtccacgtcaccgataaaactaaaacaccggtcttcccttcagctgaaacgatggttaaagacggcgggcttgccaccgttggcttgagtcaatatgatttgggcgttgaaaccggcaaaatggccgctgccgttttaagcggtcgttcaaaacccgcttcaacacccattcgctatttacgtaaaggccaccttgtcttaaatctcaaaaaggccaaagacttacacatcaccattcctcaaaatcttgtcaaaaccgctaaagaaaaaggagcgattatcaaatgagcctcattatttcaaccatcgaccaaggattattatggagtttacttagtttaggggtcttcattaccttccggatcttaaaatttcctgatatgactgtcgaaggtagcttcccactaggcgcggcattaagtgccgtcatgctacaacaacacaatatcgccctttcgctactcgttgcctttgttggcggttgtcttgccgggttagtcactgctatcttatacaattattttcacgttcagagcctcttagccggtatcttgacgctaaccggtctttattcagttaacttgcgtattttaggccaagccaacctcgcaatcggtgatcaacataatctctaccaattgccttttttacaacaattcactgtcgatcaacggctactaattttgaacctcatcattattgtcgtggcgatgttggcccttgccttattactctacactgaattcggacaagcactgattgcagccggtgataatccgacaatggcgctctctcaaggaattgccgtcaaacgaactaaaacgattggaatcgtcctttccaatggtctcatcgctttagtagggggcttggttgcgcaatataacggctttgcagacgtcaatatggggattggcgtaatggtcattggcttatccgccatcatcattggtgaacggctattagtcggtcaccacttcatttctaaattaatcagcatcatcctcggaagcatcgtctaccgtttaatcttactattggtcctccaacttggctttaatgctaatgatttcaaactgttctcagccattatcctcgccatcttcatcattgcaccacaacaaaagaaaggaatgaccacaaaatgacgcctcgtatgactttaaaccaaataagttatcaaatatctgatgataatgaccaaaaacaattactcgaccagttaagccttgacatcaatcccggagaattcgttgtgctactaggagccaacggtgctggtaaatcaacttttttcaacactgttgctggtgatttaacgccgacgagtggccaaattatttttaatgggcaagagattaccaagcaatctgcccaacagcggacacgtttaattagtcgtgtttatcaagatcctaaattagggacagccgctgatatgaccgtcgccgaaaacatcctattagccatgcgtcgtggtcagcggcgtcgtttgttgccccgtcgtctaaaacaacaattaccgcaaattaaggctctcgccaaaaccttacccaatcatctagagcaacagcttaaccgaccggtcagcgccttatctggtggacaacgtcaaacccttaacttcttgatggcaactattcaaaaacctgaattgctactattagatgaacatacatctgccctagatgccgtttcaagccaggcactgatggcttttacagatcaaaccattcaggataatcaactcacctgtttgatgattactcatgatttggaagatgccttgcgttatggcaaccgtcttttagtgttaaaagccggtcaattaattgctgattttaatgcggtggaaaaacaacaactaacaacggaaaaactccttaattatcttaatgcctaaaaaataacaagcgttcctagttctgaatcatgttcagaatatgggatacttgttattttattttgtcacaataccagtaattagttcagtccgttgataaaagaagcgaaacgcttgtaatcgatttcaacgtgtgctaaattatatgtcataaggttgtgcgcaacctaaatcgttaattcacttaaaggagttcttttactatgactggtacaaatactgaaacgcaaaaaactattccagcaagcgttgcaatgcttcgcgttcttgaatcttggggagttgaccatgtttttggttatcctggtggctcatttaattcaacaatgcgtgcattaacggttgaacaagaccgacttaaatatatccaagtacgtcatgaacaagttggtgcacttgctgccgctgctgatgctaaattaacgggtaaaattggggttgcttttggttctgctggtcccggtgcaacgaatcttttgacaggcttatacgatgctaaagaagatcacgcccctgttttagcattagttggccaagtcccaagtacaaatatgaactacaactacttccaagaatttaatgaaaatccaatgtttgatgacgtttccgtttataaccgactcgttatgacgccagaaagcttaccatatgttgttgataaggctattcgtgaagcatacaaacacaagggtgttgcagttgtcattattcctaataactttggttacgttgaaattccagacacaccatacagctcaagctcaccaacagatcgtaaacaagttgcaggtcctgttgctactgatgaagaagttgaccaattcttagcaatggtcaaagatgccaaacgtcctgtgatccacgtcggtcgtggaattaaagatggcggcgacaaactcgttgaattatcgaagaaattacaaattccaatcgtcatgactggtcttgcaaaaggcttagtacctgatagttatgaaggtaacttaggcatggctaaccgagctgcttcaaaagctgccgatgaaatcatggccgttagtgatcttgtgattgccatcggtgccgacttcccatttgctaacttaatttaccggacacacgactttaaattcgttcaaatcgataatgacgaagcacaatttggccgtcaccatttcttagattttggtatctggtcagatgcaactacttttgttgaaaaagtggttgcccgtagtcaagctgctgcaccaagtccattcttcaaggctgccgttgctgatatgaagaactggcaagcttatcttgatgccttaacaaatcggccatctgatccacttgaatttgaaccaatctataaagaaattaatcggattgctgacccagatgctgtcttttcaattgatgttggtgataatatcatcaatagtttccgccacttgcacttaacaccgaagaataaatgggtaatttcagccctctttgcttcaatgggctcaggcgtgcctggtgccttagctggtcaactcagctacccagatcgtcaagtcttcaatattgctggtgatggtgccttttcaatggtgatgcaagatttaatcaccgaaaagaaatatcaattaccaatcatcaatatcatcacttctaatgcttcattaaacttcattaagagtgaacaagatgatttaccaatggattattcaggaatctttatcgaagatcaagacttcgcgatgattgcccaagcaatgggcgttgaatcaatcaccgttcgttcttctaaagaattacctgccgcttttgacaaagctcttgaagtcacaaaagcgggtcgcccattcttaatcgatgctaagattactgacaaacgtagtatccctgttgaagaattagaattaaccatcaaagatggcaagcttacagaatcaattagcgcaagctatgatgcttctcgtcctaccggcaaagaatacagcgttgctgatttcttcgctgaatatgatggtcaatcacttaaaacattgccagaattattcgcagaaaatggcgttaaactctaatattttcaaattaaaaagcatcctaacacatattaggatgcttttttgatactttaattttcagcaatcgtttctttgggatggaaccaaacaacgttcttatcgaaaaatgacactaaatcgtttgataagtacaagatgtaggtaaagaataggacccagttagaaccgccttgcatcgctgtgatgccccataacgtaatcgaaacaatactttgaataaaccagaagtagtaactttctttaaaacgtaacgttgtcaataacgcaccagtaaagccaaccgaagcggcaacactatcaatcaacggccgtgggctatctgtcatattactttcccagagatataacaaccctactgaagcagcgaagaataataacgtcagtacccagttacgaagacccttaccgcgactcgcaagaccacggacttttttatcgacattttgtgcccaatctggcatcaataagaccggaatatctaacataataatgtagactgtttgtaataacatatcattatagtttttagcgttgtaagccacaataatgtagattaacgcagaaataatcccaaaaacaccatttaagggtttggtattagtgatactaatcgtacatgtaaaacctaacatgcccgcaaacatcgttaagattgaaacactgttaattggtccacctgaaactgtggcagctaaaataaaacccaaaccaaacattaataagccataactggctgttgtccagcccttcatttgttggatataccactttggattaaatacactggcgattgcacgactatcttgcattgatcaaaaaccctctttatgtcaaattagttatttattcagatcgtcaacaccattttctatatcttggtgcctttaaagaattaacaacactatatatagtacacgcagactttttaaatttaaactcttgtatttaattcaaaatatggtagctctcaaatcataatttttagaatacctggtaatacgccaatgcaagcgctgaactagtccaattaaaaaaagatagttgtccaccttatcaattcgctcaaaaaaagtgtcgctcaatttaatttgaacgacactttttaaatactttttaagcccggtaaattgttttagcggcgttcattgccgaccaagcttttggccaacccacataaaaggccagatgcgtgataacttcgacaatttctgcctcggtaatgccgttttccttgccaatttttagatgtgctggtaactgttcgaaattaccaccagaaattaatgcactaattgtaattaaactccgttgatgcgctggtagttctgattctcgtgaccagacttgtccaaataaaacatcatcatttaattcagcgaatttaggtgcaaaatcacctaataaatcgcgacctgccgtctgtttttttgccattttaaaaacctccttttaatttgttaatacgtcataatcagcatcagaaacagcctctagccattcaggtgttccagctgtgattgcgatgtggctaaaccaactgtccttagtggcaccatgccaatgtttaatcccgtctttagtgacaatcacatcaccaggcaccaaatgttgggctgctttcccggcttcttggtaccagccttcaccaccagtaactaataaaatttgataaccatcatgatgaatgtgccaattgttacgacagcccggttcaaacgtgacattaccaacattagcattcacatctggttcgttaaccaacattgataaatagctttgcccaacaaaaaaatcttggtaagccacattcggttcccctactgtaaataattgttctgtttttaatcgttcatttttaaccatttcaataacctcactttattatgattcgaatcgctgtaaataggtttcaaagctttctaattgacctatcgactggtctaatttgccatcataccagtctattttacggcccattatcaccaagttcgcttgtagctcagcgacttcggcttcagcgcgtgctttaacctgctgcaatagcgccttgcgcgcctcaatcgttggatcaccttgcgctcgcaattcaacatagttctgtaattcggtaatccgcatccccttcccttttagatggaggaaaaaaccgacccatttaacatcctctaacgtgtaatagcgtaacccggctgcatcccgttgtggtttgattaaaccttgttcctcgtaatagcgcaacgtatacgttgataatcctactagcgttgcaaattcaccaatcttataatgtttttctgccaagctaaccgcctccttttaataaaccggtcgatcaccgtccgtattaggctgattaatcccccaacttgcgcgaataccaagggttggttgatcaattaggtctaccaccaccttggcgatactctgtcgtgaaatgatcgtccctttaaatggtgtccctttttccgttaattcataatcaataatcggttcgtcggtcatataagcacaccgtaaaatcgtgtagtctaatggcgattgttcaacaactgctgctgctctgcgcgtatcttccatgacatcgtgacccacagcacgttcattccacgcaccaaattctcccggcacttcatgataaagacctagcccactgatataaatcaaccgtttaacaccggtcgctgtcattgctttgacgacggtcttcattaaaggttcaaattcgccacctaaattagcataaacgatatcgatccccttcaaagctgccgttaatcgcgcttgatccaaaacatcgccttcgataatcgtcacatgcggatttgtttttaaagctgccaatcgttcagcattccgcagatataaaactaattcgtgttgcttagctgctaataaatcttgaataaccagctgtgcgacttggcctgccgcacccaatactaatattttgctcatgatcgtcactccttcacttcagtaactgtagaatacaccttctagtggactataaggcaagctttaatttaaaaaatatttcaattttgcgcaatttaaaagtaatcggttgaagtattacaaatcgtagtttataatggttataaagtaataaaggttattggaggctttactgtgactaaaaaattatctcttgctcaaaaaattaacgtcatgcgagccagtgtgatgggcgccaacgacgggattctttccgttgctggtattgttattggggttgccggtgccactagcgatcacttcgccatctttatctcagggattgccggcatgttagccggcaccatctcgatggcgatgggcgaatacgtctctgtcagcacacaaaaagatgcgcaagaaatggccattttcaacacacaactcaatctaaaaagtaattatgaatctcaaagcgcctttgtccgtcaaaaatacattaaaacgggtatcgctccggaattagcgactaaagccacccaagaaatgatgacggctgacccactaacaactgttatccgggaaaaatacggctttttacctaacgccttcacaaatccttatgcagctgcgattgcttcatttatttcatttcctattggttctattttgccactagcagcaattaccctatttcctaatcgcattagcgttatcgcaactatcatcgcggtgatgattgccctagctattactggttatagcgccgctgcccttggcaaagctaatcgttccaaagccattattcgaaacgtcgtctccggtttattaaccatgattgtcacttacgcaatcgggacattgttcaaacaataaacgcttacctaactgatttttaaaacgcacaattattttttctcgaaaggatccttttctatgtcgatttcaaaaacaactaccccttcaattgaaaagccccaccaaacaatggaagaaaagatgaataccttacgggctggtgttttaggttccaatgacgggattttaaccgtcgttggcgtactttttagtgttgccgccgccacaactaataatttcacgatttttatcgctggcttagcagacctgctagcctgtgccttttcaatggccgctggcgaatatgcctccgttagttctcaaagtgacactgaaaaagccgccgttgccattgaacaacaacgcttaattcatgataaggaaggccaaatcaaagaagtgcaagccttctacgaatcaaaaggcgttacaccagaaacctcactagcgattgccaaagatctcatgtcgaaaaaacctttagcgaccatcgtcaacgttaaatacgatttagaactcggccattatatgaatccttgggcagcagcctttgcttctcttttctccgcagccttcggtggtgttttcccattatttgctatgattattctccctgaagcctacaaaatgacggggaccatcattgccgttactgtggcggtttccattacagcttatatcagtgctaaacttggtgacggtaaggtcaaagtttcgattattcggaacattctaatcggcctagtcaccatggctattcactacggcatcggccaacttttctaaatttaaataactaaaaaagtctcgggacaaaagtgatttttgtgccaaggctttttttaatgattaattttatttatcagaaaccaggcaatcttttcatgaccggcatcattgggatgcaaactatcgagactaagagcttctgcttgttgcgcatcggcaaaagataatgccttttgattaaagagactgatatgcgtaattcctagcaattcagtgacttgaacaattgccttttcgtaatcggcttgtcgataaccactttgattgatggctgggaaaaaatccgttccaattttgacatgcgatataaaataaatcgttgcttgcggataatgtttactaatctggccaagcatttgctgcaacgcgccgtaaaaagtcacggtcgtttggtcgccaaattggcctaacgggacatcgcgaccaaaatcattgataccagcatagattaataataaatctgtttcagttggtatctgttgccagcgattgaccattggatcgtacggttgggcaatcgttgagccggaaataccgagattggtgatcttaggaatcgctaaccagtccaccaaccattggtaataccattgatgcgcatagtggtttcgttgatcggtgatactatctcctaaaaccgttaaatgttgataatgtctcacctgtcattcactcctattaccgaataatctatcaattgccagttatttctttgccaataagccatcgcttgtaacgtttttagcgtctcaagctcaaccaagcggttagtcgttagactacttttttgcctcaaagcactagataaatacccgacatgacatagaatgaccggtggcaccgtttgatcaactaacagtaattgttgttgaatatcagcgggtgttaagtatggcccttgttgcgccgtgattaatgcaccagtcgttttaaccgtgctcttttgccacaaatcttgataagctgcttgctgtttaaggggtaacttagtcacttcatgacgcagtggcacctggtaggtctgggccaactcgagcactaccgcataaatggcaggcgttaaagtggcgacaaaatgatgtgaggtcagatgggtcagttttaaaccgctcgctaaaaagcaatcaatctgggcctgaaactcacgtctgacctcattgatatcaagttcttgttcacgtgcttgtaagttcgcatagcacatcaatcggccagctgttgtcaccaaacttgggatgttttgcgggtcacagatgggtacatccttatcaagtacaagatggagccccattccctgaatccccatttgctgagccaagaccgcactcgccgcaaaatctggtgacgtcacttgtgcattggttgccgagagcagtccccgctttaaccctaatataatcgcccgtgaaattgggatggtcatcccaaaatcatcagattcaacaataattgattgcatatggcaccttattctgcgctcaaatcgaactgtccaatgacactgtccgtcgtcactgctgctggtagtggttcggctggtgtaaacgtcgcattgctgctgacgaccatgattgtattagctttatcagctgcttttaattgtgcccagtcgattgtcacaagtggttcgccagcttttactttaaaatcagcttccacttgcatttcaaaaggtgcaccttgtaattcaactgtatcaatccccatatgaatcaagacttcaacaccttgtttcgttttaatcaagatagcatgttttgttggaaaaattgaactaaccacaccatcaactggcgcattaatcgtattcgtcatttcgtccggcacgatggcaaaaccatcaccaactgccttactagcaaatacttcgtctgtcacttgttcgattggtaaatagtgacctgtaacgggcgctgttagttggcccgcaggtgcttttttcataaatttaaacatcattcttatcctctctttattcaatttctagcataacggcttcatatggtcgtaatgtaatttggtcggtcgttaattgttggtctggataattactcatcatcaccgcttttacggccgcgttagcgcgttgttgcgtttgatctgtaaagtttgcgatcacacggacttttttatcacctaactgtcgttgataagtataaaccgcttcatcttctggtgccaataattgatattgaccttcaataaggacaggttcagtcttacgtagcgctactaaatgttggtaaaaggcaaagacactatctggtgcttgtgctttagttgccaccgaataatcatccgcaacaactggttgcaaccaaggcgtaccagttgtaaagccgtgattggtagtcatatcccattgcattggaatccgacaattttcacgcgatttttgttgcaggatttgaagcgctaaatcttcactaatcccatcagctaacatttggtgatatgcattaatcgattcagcatcttgatattgatcaatcgaagtgaaattagcattcttcatcgcaatttcttccccttgataaatatacggtgtgccttgtaacccaaattcaactaatgccaataacttagcggattgatcacgatactgaccatcgtctaagaaccgtgaaatcgcccgtggttgatcgtggtttgaccagaataatgcattccagccaccacctgctgccatttcagtttgccattgacttaaaatccgcttcaaatcagacagacggtattgccctagcgtccactttttaccacccgtataatcgactttaacgtggtggaaggtaaatgccatcgagagttcttcacgttctgggttcgtataacgaattgcttctgaaaccggcgttgatgataattcaccaaccgtcacaaagttgttagggccaaagacgcgttcatacatttcatgaatatattcgtgaacgtgcggaccgttggtataaaagttacggccatcgtcactcggtgtctcgaaagtatcatttggaaaatctttatccttcgagatgttattgatcacatctaaccgtaaaccatcaatccctaaatcagcccaaaactgcatcatttgatagatttcttcacgcaattgtggatttcgccagtttaaatcaggcatccgcttctcgtataaatgtaagtaatactgatttagcgcggggacatactcccaagcactaccactaaacttagataaccagttattcggttcatgaccatcaactggatcacgccataaataataatcgtgataaggattgtccttgcccttcaaactttcttggaaccaacggtgttgatctgaagtatggttgaccaccatatccatcataattttaatcccccgttgatgagcctctttcaaaagccgttcaaaatcagctaagtcaccaaaaattggatcgatttgataataatccgcaatatcatacccattatcccgacctggtgagacatacatcggtgttaaccagattaattcaatccccaaatcttgtaaataatctaaacgttggataatcccgttgatatcaccgataccatcaccgtttgaatcttgaaaactccgcggataaatttgataaactgttgctttttgccaccatttcatatgacgatctctcctatgccgttacttttttagtcgtacctggtttttgtggtttagccattccttgcccttcttgcatttggtcgttataaccccaaacgtaagtgacgatgaatggcacaattgtcgcaaccgctgaagcggcaatgaagatccagagatttgataaatctgctgggtgttttggatctaagaatgatgcaaatccaatccatgaaccggcaaaaccaaacatattgccatgtaataagccgctgacaaagccacccgctgctgaaccgattaagccagagatgaaaacccgtttgtatttcaagttaatcccataaatagcgggttctgttaccccacagaaagctgaaattgcaccagcaaatgataattcttttaaagctgttttccgagttttaatcgcaactgctaataccgcagccccttgtgcaaccattgtcgtacttaaaatagcgtttaaataactgtgtccggaagtggccacgtcgttagcaataattggtaaaattccccagtgaagcccgaagataacgagcacttgatagaagccgccgattaatagaccggataaccaaccactcttcaagagtaagaattgaataccaaatgctaagccgtttgataaccaaataatagctggacctataatataaagtgtaatggctgcaacaacggcgattacaattagtggtgtaaagataatttgtaagtagcctggtaaccaattcttaacccattttgttaatctagcaaccaaccaagctgctaaaatcattgggaagattgaatacgtgtagttcaccattgggaagtttaacgaaccaatctcaaggagtgatttaccgtttaaagcgactaatgatgggtggactaaaacgcccccgataaccgctgttaagaccggatcgccttttaatttcttagcagctgtaaatccaactagcattggtaagaagtaaaagacggaatcgcccatcgcacttaaaataatgtagaattcactcttttgactcactaacgcgcctaattgcggcatcgttaacattgctaaaacaccttttaaaatcccgccggcagccaagattccgacgatgggactcattgcaccagtgatgacaccaattaattgactaaaagcgtctttcacgtgcccccatggtgttaggttctgttttcttttagttgttgcgaccacttgggctgtttcatcttcatcggcaaagtctgcgccaatttcagcaatcacagcgtcataaacggccgtgacctgattcccaatcacaacttgatattgaccagatgctttttgaacattaataacgccatccaaagctttgatcgtttctgtttgtgcctttgattcatcttttaaataaaaccgaagtcgtgtaatacagtgaattaaactatcgatattttctttgcccccgacaccggcaacaattgcttttgcgagttgtgaataatctttttgtgccatattaaatcctcccttgatttctttttataaaagcgctttctgtttatggactcatcatacaacatgtatagacaagttgtcaacgaacttcttaaaccgttttcaaattgcacttgcaacttcgccatttaatttatatgatggaattaatcaaacaattgaggtttagtctatgtcgaaaaaatatgaaataatctaccgcgaactcgtccataaaattacgaaccatgtttatccagccaactcattcttacccagcgaaaacgaactcgcaacagcgtatggtacctcacgcgaaacagtccgtaaagcactcgctagccttttagaaaatggcttcattcataagatcaaaggcaaaggctctttagtccttgattttgataaatacgcctttcccatttccggcttgaccagttaccgcgaattggatagtctctttgaaatgcacacgcaaacaacagtcctacaactccaaaaagcaacagtcccacaagcgccttttcatttagatcccacagagattctgcccgcgacctatattcaacggttacggaccgttgatggtgaaccaattgttatcgataacgactacgttctaaccagtgttgtcccagaaatctcacgggtagtcgctcaggattcactttatcactactttgaacaagaattgggtctaactattggttatgggaataaagaattcactgttatccctgcaaccgaagaacagtgtgccatcttaaaactcgcccctaatagtgcggtcgttagtgttaaaggtatcactcatcttcaggataataccttaattcaatttaccgaatccattcaccgggctgataaatttaagtttattgaacatgcgcgccgccaatcaatttaaaacaatcataatataaaaggagggaccgattttaccatcggtccctcctttttgatgacgccactaactgtttagtgcaccaatgctatttaagagttgatttaattttagtcgttgctgtttttgaatcgttcgacattgatttaattgttgttccacttccgactcttcagtcaatcgcatcgcattaacaaaatcctttgcagcagtcacataatgcttaataaccatctgtaattgctcatgtaatacgacaaattccgttggcggttgaatacgcgcaatttgatcaacaaattgatcgaggaccgttaaattctgtctggaatagtgattaagtaattgtaaattttcatctaccaatcctttaccccgcataatatttttactagtttgcgcatattcactaaaaaccgtttcgaagacaataaaccgttctaaaaaccgattccattggatcacataagcttgtgccgatagctgaattgttggttgtaacattctaatcgcctccttgactatactttaaaacttattgttatcataatcgtatatcacaaggaggcaccttgtcaaagatagtgcatttattcacatttatttaattaaacccgctttcgccatcgtgacccgatcagtattattaaccagatcaaaagtgtgcccaaactaatcagttgtccaagcagcaaccccggtgcccgataccgtaactgtacctgattggcgccacgttttaatggcactgctagcatgttggccattacctttttaggtttaatcatttgcccgttaaccttagcttgccaaccagcatcatacggaatgctgagatacagtagttgattagatgccattgttttaatatcgccagtgacatgtccgttatcttgccataaagcagtcgtcgttaatttttgctgatcaagttgtttgacagcttgattaaaccgttcttgattgagtgtcgcaacttggaaatgattaatattctgccgtttagggctaatcacagttaatcgtagcggttgccctttatgcgagtcctcaagcgggataattgcagcactcgtcactctaatcggcgttttcttcttacgaccgttaacaaataatttaattcgcgctaaattttgatgtggtaaatataaatacgtaggaccttgcgtatctcttggaatttctagcgtataccggtagctatgggccttaatttcttcatggaccatattaacccgatgatttgtataaaatgcttggtcagtatttaccattgcttgtaacaaccgatcctggttgtcgaatggccgatgctttttcaaagtaacatgcgctaattgccgattaaccgcaaaacccaatccaagcgtttgatgtcgttgaataaccgtttgctgattttttggttgtaaatcatagcgattggtaaataacagatccgtaatcgctgtatgtccgaccccattaattcgccggacgttcttactgtaaaaaccaaggtccaccagcatactgcgcatttgttcgtccaaagttgatgagtaattatttaacgtatattggccaaataacaaggcatcgttgtagccataataaggttcgcgatacgccgattttaataagatcgactggttattgacccgataaaaatcattatctttttcactgagttgttcatacagtgcagcttggcgttgatattgttgcgcatattgtttttgataacccaatggtattttatgcgtcattaattgaaaattagtgactaactcgccaaatgataccaaaacaacgcctgttatcagtattttttgatagtgacggtttgtttgaccccaataataaaataataacccgagaaatattgtgtagccacttaataatatccatgattgtgctgtaacttgcggataactctgattaccgtgtaatctcaattgaccaatcaccaataaaccactcactgaggcaatggcccaccctttagcctttttattttgcccttgtactaggcttgcttcgtaggcaattttaattaagacaaatgagaataagtaagcattccggtagggaaacccttctggctgctgaaacatatgccaaatagtattaaacgttgttacccaaaaactaagggctaaactaatcactaaaaagccattagcgtacttcgcctgttttcgaatttgtggcaacataaaatataaaaccgcaaacaataatgccaatgtgcccacaaaaagtgttggttcgtgcgttaatcgttgtgtataacgactgccaccgacctgaaattgcgtaaacacttcccagccaaattgtggtgtcgggtaaaaactggtcatggcaattgtcttttttccagtctttaacatgcctaacaacgctgggaggaggataatggcgcttaagccaccaacaatcagtgatgaccaaataaactgccagataacccgtgcttgctgctgtaataaatgcccccacttttgctgtggttgccgttgcttaattacaaggctaatcatatataagacggcaaataagcatgtcatgtaacccaaataataattggttagaatcgaaatcgtcaacgtcacaatgtaaaatgtcggcttcttaactgaaaataagcgttcaaggccgatgacaatcagtggcactaagattaatgcatctaaccacatcaaattataaaaattcatggctacaaagccacataaactataagccgttgaaaaaatcaatgcggcataatgataagtcgttgtccgtgttctcagaaaataactcattgtcacgcccatcgtacaaattttaagcgcaatcacgtaactcaccataactggtaactgactattcgatcctaaaagtaacaatagattaaacgggctaatcaggtaataggccgctagcggcactaaattgccacctagcgataatgaaaacgagtaggcactgaagttaagatgagcgacttgccgcttgaattcagccaaaaatggcatgtactgtgtccctaaatcactaaacaataaattatgattaccaaaaggcactagccccatgatggcaaaaccgatcaagaccaatactaacggcaatccgaaactgagaccgtaatagctgatcgcctgtttacattttgtttgcatcaaatttcaaccctctcttgtttgaagcacaaactaagcatagcatgctgctgagctaaaacaccaccaaacaactacgctcactttgatagcacagttattaaacaaaaaagcagactactacctgtcattaaggtattagtctgctttttgattaatattaagattatttcatcattccaagtgtcacgccaccgacaatgactagtaaacagccaagtgtgacatacaccatttcttttttcgttttacgttcacccaagaggtagatactaccaattgttgaaatgataatcccacattgtgaaagtgaataactgatggcaagaccgatatctgacattgaaatcaacatgaacaagtttcctaagccccataatagacctgttataatgttcaaacctgttttcttatcaaagactgctttaccaataccaacgccagcaaagatagcagcgccgataaacatcccaatcgcttgtggtaagacgattgttgttgcactaattcctgaccagttaacaatgattgtgtaaccaccataaccgattgttgaaagaatcaaagcccgaaagccacgtgcaaattgtgtatcttctttagcagctaagctactcttaggatctttcattgatgttaacgttgcaccagcgattaagatcactaatgctgtaatcccgaagatataatcatgggttgttttccattcgtggaataacaaagcgcccgctaaagtgtttacaatcaattgcatccctgttgataatgggacggtttttgaaacacccattgcttgcattgattggaattgttgcccttgaccaatgctccagaataatccggaaatgacaccgattaccatgatgaataaatcaattttaggttgaataaccaaaaaggtaccgattccaaaaaccaacgcaccaatcgtcatcccaaaagtttgttgataagcgttaccacctaatttaccacttaccaatccgatactaccccaggcaagtgctgggattaatgcaattaaaatagccatttttaaattcctcttcttctctaaagtacaagaatccattatacagacaaacgcaatcgatttctagagggaaaacggcaccattaagcgccttccaaaatggtctgtttatgaaaaaatgattacaccaaccatgttaacggttactgtttttttgcgtataggttgaattttttttacttttttttagtaaacccgctaatcttttttagtaaacccattaacctattgttttgacgtaattaaaaaggtatcaaagaccaatcattcgtctttgacacccacaatttaatgttttaaaattcggtagcctttgtacaaagtcaccccgataatcgcgccaagtgtattgaagattaaatcatcaatatcggccattcctgttcctaaaataaactgggcggtttcaatcccaaatgaaaatagtgcgccttcaataatcgttaatagccaggtcccttttcgatctgttaatgaaccacgcaaccacccaaacggcacaaaccacagaatattaccatagaagttataccagtaatctaattgtgccggcgcattccgtaacttaaaagtctcgacaaacggtgttaagttaatttgggttagagagcggttgacatataggtgcatctgccaaggataataaatatggcgtaaaaccgttaacgataatagtagacatagatagaagacaaatataaaaagtttcaattcatacttaaattgaatccgacgttttttaaggcctaaatacaataaacgcagtccgataaaaataaaacaatacaaaattgtcttatccaaactctctaccgtcaatttaattaagggcagatgattatattttgtcccccaaggaaggatgatgttgttataaagaccacctagaaataacaaatgataaccccacttatctgattgatttaagctattacgtcatacgtctattatatacactttgacgactaaatgacatatgccaccccgctaactaaagtgaatcttaaacttctaatcaagatacgcctagcgttggaggagagatttaacgagctatgctataatggtgtgattagttaccaatacaacgtgtcataaggagccatttaatgaaagttttattgtattttgaaagtcaaaaactactcgctaaatcaggaatcggccgcgcactagatcatcaaaagcgtgcgctaactgccatgggcatcgactacacactcgatcctaacgatactgattatgatatcttacatattaacacatacggtttaaatagccgacgaatgattaaaaaggcgcgcaaggctggtaaaaaggtgatttaccacgcacactcaacagaagaggatttccgtaattcctttgtcggttccaatcaactcgccccttttgttaaacatcgtttggttagcctctattcaaaagccgaccatctcattacacccaccctttattcaaaggcgcttttacaaggttacggtattcaggtgccgattgcgccaatttctaacgggattgatcttgctaagtatcaagcaacgccggataaagaacaagcttttagagcttatttcaacttgaagcccgatcaaaaggtaattatttgtgtcggtttattcttccaacgtaaaggcttgctagattttgttgaaattgctaagcaattacctgaatataccttcatttggtttggtgatgtgccgatgtacagcattccgcgcaatattcgcctgattgttaaaaaggaccatcctgcaaatgtgcgcttccccggttatatcaaaggtgacattatcgaaggcgcttatgctaacgctgatttattctttttcccttcttatgaagaaacagaagggatcgttgtgctagaagcccttgccagtcaccaaaaagtcttggtacgcgatattccggtctaccacggctggctcaaagatcaacaaaattgctacatgggtaccgataatacggaatttaagcaattgattcaagatatcgttgaacaacgcgtccccgacttaactgaagcgggttatcaaactgctgaatcgaaacagattaccgcaattggccatgaattagcggccgtctaccaacatgtcttaacccctgatgaatcaaatccaacttacacgcaaatcatgcagcacactttaaaactttaagtttccgtttaaatcatgtcatgcactttgcgctgtcttcatttgggcggtaaaatgagtcaatgacgcgctttagattgattttgaaaggatgtcacatttcttgaaactcacaaaaataaaacaatttatggcctctaaacttggctttttaagcctattagtctttttattttgggttaaaaccctttttggttatttcaccgatttcaacctcgcagctagcgatccgctccaaatggccattttaatcttcaatccgctcgcaactaccttgcttgtcttggggattttattgtacattaagcaaccgattatcagttattggaccgggctggtgatttacacggccaacacggcccttttgtactttaatgtcatctattaccggcaattcaccgattacatgacaattaacacgatcctcggttattcaaaagtttccgcgggcctcagtaaaagttcgctggccctaatgaactggcacgatgcactctactggctcgacattatcatcttggccgttttaatcttattaaaggtcattaaaattgatcaccgccaattccctaaaaggtgggcatttagtattacgtccctagccgttttgttattcggtgttaatcttggtctgagtgaaatcagccggccacaaattctctcacggactttcgatcgaaactatattgttaaataccttggtattgatacttttaccatctacgatgccgttaaaaccacccagaataatcaagtccgggcccaagccgaaagttacgacttagatcctgtcttagatttcactaaacaacactacgccgcacccaatgccgattatttcggcgctgctaaaggtaaaaacgtgatcgtcattcatcttgagagtttccaacaattcttaatcgatttcaagtttgaaggtcaagaagtcacaccatttttaaacagtctctatcacaaccaaaatacgctagccttttctaacttctttaatcaagttggccaaggtaaaaccagtgatgcagaaaacatgcttgaaactggtgtgtatggcttaccacagggttccgtctttacaacacttggttccgacaacaccttccaagcagccccttcaattcttaaacaaaatggcgattataccagcgccgttttccacgggaatgttgggacgttctggaaccggaataacgtttataaaaactttggttacaactatttctttgattctagctattttaatacgagtcctgataacgtcttacaatacggtctcaaagataaactcctctttggccaatcgattaaatatttagaacaactacaacaaccgttctattccaaatttattaccgttactaaccatttcccattcccacttcctaaaacagatggtgatttcccacgggcaacaaccgaaaattccgctgttaataactactttgcaaccgctcattatctcgatcagtcactcgctgaatttttcaattatttgaagagttctggtctctataataaatcaatgattgtgctatatggggatcattacggcctctcaaattccgataataaagctttatctggcgttttaggccgtgattatgacacttggaccgataacgataatgcccaattacaacgggttccttacatgattcacatgcctggtttaaaaggtggtattcaaacccaatatggtggcgaaattgatgccttaccaaccatgttgcatctattagggatcaatagccaaaattacgttcaatttgggacggacttactttccaagcaacacgatcaagttgtcgccttccgaaatcataacttcgtgacgccagaatataccgtcctcgatggcaccatctatcaaaatcaagatggtacggaagtcacccaaccaacagctaaattgcaaaagcaagtcgcaaaatggcaaaagcaggtcaatcatgaacttagcctttctgactcagttaacgagaaaaacctcttacgcttttacacaccaactggtttcaaaccggttgatcctgccgattataattatcaaaccggctatcaacaactcgttgagattgaaaataaactaggcactaaatcaacaagtgtcctttcccaaaacaaaggcaaatcaacagtcccattatttaaaacagatgcccctgagttagcagatgatcaatctagtttaactgaagtccctaaaagcaaagcactaaaagatagtgcagctacctcgtcaagtagtagctcggaatccggtcaatcaacatcagaatagtcccaaataaaaagtgccattccgaatttggaatgacacttttttgtatttaacgcgttaatacttgtttcttaaagctctcaaaaacagattcttgtaccgttgtaaagataataattagttcattatcggccgcaatcttgcggacatcgtttaataactgacgcgcatctcgaggggctagttgatctaaataacgcgctaagacgaagacctgttgccgatttgctaaaccacgaataaattgaatccaaaactgatcgattggtttcaacgcgcttccttgtgtcgtccgcacttttttgacatattgatcagtcaagatactaatgactgactgatcagcatccttaggtaacaatagattatcccaccccgataagaacggtaggatctttggttgcgcataatcaatcgtaaagggctgattagggagttgtaatgctgtcttcaacaactctggttgactgaaataaatctgcccgacttctaatggttgtttgttcaacataccgactcacctcttaaatattttttcttaaaacgactgacttgtaacccaccaatcattaaaatcggtgcggctaagctaatgattgcttgccataattgcccaaaaatttgattggttaatgtttgtttgacactattgtgcagtgtcggattcaaaagagaatgactactaaaatctgtcaaatgatttttaaagagtgggttgagcgttttaggtgctttttgcattgcttgcagtggtcgatgccaataatggttgatcgcttctaatcctcgccagaacggctgattagcgactaacaacaaaaggctgatcgttacgacagcaaaaaatagtaagcaaagcgccgttaagccgtaatacaacgtcactttcgttcgtgtccaattggcactaaaaaaggtttcgatatcacgcgccaaaattttaaacgccaaccaaccaatgattactgtggcgatgatcccgacaatcattagtaatagatacgcagtttgataccgctctaagactgtctggttagaatggagtaatgtctttaacgggtgatccgctgcaaacttttcttcagctgtaaaattagctaactgactcttgagttgggttaagttatgtcgttctaaccgaatcaagcccaaaataattgtcgccaggcctaaaaataaacagtccaataaataaatcgctagcgactgccgccaataataatgaatattggccggaatcgattttaagaaaaacattaactcacccccttatagaaacagtgtaaagctaaagtgtgaaaaatatatgaactatctggtaaaaaataaaaaagccagcataaaataattttatactgactgtcataacgatttaaatcacttttttagtttgtagttgaacagctaccctataaaaaagcgctgtgatcaacatggcgataaaggttgcccctgtataggcgtgcacgattgcgaattgatttaagattaaataactgataacgccaatcacccaactgaataatgccgttagatgatagccctttgtataccagtatggtccagcaatcgtattaagcgcgtctacttgatagtgtcggcgtctaatccagaagtaatcgactaagaaaatcgcaatctctggtcctaagaacatcccaatactatctaagaaggtttcaaaggtggtcaaaaatgacgcgacataaactggaataaaggtgacgaccgttgccaacaaagtgacacaccagagtgctggcgttaacttgagctttggaaatatgttagtgagcgctgaaccagcagccattaaattaacagcattcgcggttgtactagtaattacaatcaccaacaaggctaaaactccgagtcctaatttagcggcaatcgtacttggatcagcgttattaggatcaaaatgattcaaagtaatcgcggtcgcaattgtcgccgtcaaaccgatgaaggcaaaccagaataagccgatattagcccctaggaatgaataaacagttgcggccttcttacgcttggcaaaacgactaaagtcagcagctgctgtgacccacgctaaattaaaggcggctaaaatatcgattgctcgaccggcttcaagacgaaacttggcagctggacgccaagccaccagatccttgaacggtaccattttgaaaacaatgattgattcccatgtcactaagataatcacgagtacaatcccaatccgttcgatccaacgaactgatttttcacctaacgaaatactgataagatgcaagatggacatgatgatgatcccaacaaccaagctcaagcgattcgtagcggcatcattgcccgaccaacccataatttctttcaaaataaagctcacagaagtcgccgcaatataggtattaacggctgcccaaccgatgaattgcacgacgttaatgagtgacggtaagactgaacctttaacgccaaacgaagcacgcgttaaacccattgcacccacaccagtttgatagcccatataagaagcaagtgctaataagacataggataaacagccgatggcaatcaacagtgtagagccttgaataagaccagttgcggcaataataccgccgatgtaccacgtcccattattagcgttggcacctatccaggtcgcaaataaatcccaatcacccatcgttctttcagacttagcgactgagtgaatcgtatgttgttttgccattttctctcctccaacttcgaccatcacaaacaaaaaaggcccactccaaaacagagcgaggccattaaatcccgatagtcgctcctttgtcagcctctctggactgcacttaaaaggaattatatttataagcattgtattaaacctacttgccaaagtcaacccagtattgttatactcactattaaaaaatagcgaggatggattcagatgcttattcaaaacgttcatatcgagaaccagacagctttaaaatcaattagaattgaaaacggtcttataacagcaattgaatcacatcttgagccccaacaaaacgaaaaaataattgacggccaacaacaattagcgctcccaccgtttgttgacccccacgttcatctcgattcaacactaactgccggacaaccagaatggaatgaatctggcacactttttgatggtattcgaatctggtccgagcgtaagaaaacactgacacaccaagatgttaaagaccgagccctcaaagcccttaaaatgcaggctagtcatggggtccagtttgttcgctcacacgttgacgtcactgatcctgaactagtcgcccttaaagcactgattgaggtccgcgaagaagtgaaagactggatgacattgcaacttgttgccttcccacaagaagggattctctcctttccaaacggtaaggcgctaatgactaaggccgctcaactaggggtggacgccattggtgcaattccccatttcgaattcaatcgagaatatgctgttgaatccttgaaatttgcctttgaactagcccaagaatatgatctactattcgatgcccatactgatgaaatcgatgatcctaattcacggagcctcgaaacaatcgctacactcgccttagaaactggcatgaaagataaggtaacagcctcgcatacaacagcaatgggctgttacaatgatgcttacatgtataagctaatgcgcttattaaaaatggccgatcttaattttatcgctaaccccttggtcaacttattcttgggggggcgttttgatacctatcccaaacgccgcggtctcacccgggtcaaggaattaacagctaacggattgaatgttgcgtttggtgaagatgacattcaagacccttggtaccctatgggcgatggtaacatgttagacgtcctccatgctggtttacacgcaactcaaatgatgggttatacagaaatcatgaatgcttaccgcttcattacccacaatggcgctcgggcaatgcatgtcactgaccaatacggccttgaagttgggaaacctgcccacttaatcttaatggctagtgataatttctataatgcacttaatcaacaagccgctgttacgctatcaatccacgctggtcgtattattagcgaaacacaaccggctaccactcagttatttatttaaaagcgaaaaaaacgcaaccttataggctgcgttttttgtttgcgtatttattaattagcatcagttgtgacggtttcgtctgggaaagttaatgtaaaggttgtcccttgatctggttcactttgaacctcgatggtcccatgatgtaattggaccagttgatgaacaattgctaagcccaaaccagattcaccgtattttgtgttcttccgggaaggatcagccttatagtaccgttcccaaatattcttaacttgctcagacgtcatcccaatcccagtatcactaaccgtcagaatggtttcgtggaacccagcttctgcagtgaccgtgatttgcccgtcattggtaaattggatggcattttgcatgatattaaacataacctgaacaaagcggtcatagtcggcatagatagccacttcttcttgtgcttcaagcacaatggtgtcaccggcatccgccgcttttttctgaagttgttcttgaatattttgcaacgcttctaccgcattaaatgtttgttgattcaatttaatttggtttgttcgaatcttttcataatccaagttctcattaaccaagcgaattaagcgattcgtttcgttttgcattaatgaaatactcttttctcgcatttcttctgggatggcatcgtaggctaagccttccaatagccctttcaccgtcgttaatggcgtccgcatttcgtgtgcagcatcggccataaattgacgacggcgatcttcttgccgcttaatttcggcctcagattcattaagcgagtggaccatttcgttaaagtcggtcgccaaatcatccaattcatccttaccggggttatcaatatggacatcaaaatccccttcggcaaccagatgcgttgcatttcgtaagcggctaatccgataaatctggtagcgcgctagaacataactgagtaaaatcccaccaatcgtcgaaagtaagaaggcaatcaataaattcttgcgcatcgtcactaagcccgacttaacgtttttaatggaggaaccaaccccaataacataaatcaacttatcattatagaaaaccggtttaaaaacaaccagttgatcttgatcattattaaattgccgggagtccttgctcatactgagtcgttggacctgccccttcttcaggtatttccagtactttttcttaacggagacgttcgagttaggcgccgggtagaccatttcattttgcgcattaaaaaaattaaaactaacccgttgttgcgacaggatcgcttggctatcgtcaataaactgcttggatagcgttgcctgtgagccttgtttgaacgcttcacgttcgataactgatgcgtaaccttccaactgatcccacgtattattataggccgtcttcgttgaatattgcgtaaacgcaatcccaacaatcacgatggtcgtcataataaccccaaaaaaggctagcatccactgatagatcagtttcattagtgtttattgaccgctgaatcatcaaatttgtagccgacaccccagaccgtctggatcacttggggaccaaccttttcgatcttttgacggagttttttaatatgggcatcgactgttcgttcatcaccaaaatattggtaatcccaaacaagttctaataactgttcgcgtgagaaaacttggcgtggattcttcgctaaagttttcaataaatcaaattctttgggcgtaagatctaaaatcggttcgtccattaaataggcctcgcgcgtcttagagctcatcttgaagtgatctgtttgcacatcataatcggagttatctacttcttcaacttgcgcggcttccgcgccaacttgttcatcaactaactcagcacggcgatgaagcgccttaatccgggcgatcaatgtaattgggctaaaaggtttcgtcacataatcatccgcacccaattcgagccccaagacttgatcactctctgaatcgcgagccgttaacataataatcggcaccactttagattgctcccgaattttttgggcgacctgcatcccatccattcctggtaaattcaaatctaacgtaataatatcccaactatcaggatcaacactaaattgttcaaccgcttcattaccatcatacgcaaagtgggcatcccatgcttctttttgaaagaacatgcccatcatttcagagacagacttattatcttcaaccattaatattttcattagaattccttctcttttgtgtgattatattcttattatacagtatcttaaccaatggcggatgaattaaatatgaagaagctatgaaatttaccacgttgaattgacgaatcttgacacgcttgttaaaattaatttataatttaagtgatttatacgcaagtcaaaaattaatttctaacgctcaactagtcttttataaaattaaatctcctgtaagctagggcttaaccaattggttaggccctttttttatggccaatcggattagaggaggtggtcaacttgatcgaacacgaagcactttttttcaaaaacctgaagattcttcaagatttgaagttcatgatttatgaacgaacgtcacctgcaatcgattttcattgctttggtattatctatctcgaagttaatcaacaacagattgacctcgcagcggaatatcaggctttaaaaagcgatcattcattgggtgaaattgcccagacaatcatcaatcactatcagttatagcagttttactcgggggagtattaatcaaacacatgaacaatttagccatcttgtaaaccggaaggacgtttatttgcatgcatgctgaaaccatgctagcatggagtttattatgatattaggaggcacttattttgacctataaaggacttgtattttttgatcttgacgggacactttacaatgaacactctcgcgtggacccagcagtcgccatcgctgttaaacaactacgcgccaaccattacctcccaatcatttctaccggccgttcaccacttgaaattcaagaggcattagcaattaccgggattgactcattcatcgcattaaacggtagttacattcaatttgaaggccaaccggtttaccaaggcactattccaactaagacgattgaacaagtggttacaatcgctcaagaagctggcgaagcagttgccttttatgatgatcaagccattcgaattaccagtgttacacaagcagctaaagatgcttatgctgaagtcaacgcaccagtaccaagtgttgatccagaatattacttaaatcatccaatttatatgctgttaattttgacgaacgacaatgatgcggcttatgcaacagacgatttaacattctaccggaacacaccttattcaatcgatactgttgaaaagaacggttctaaacaaactggtattaagcgactacttgcttctcaaggattagaagacatgccaacttatgcttttggtgatggtcgcaacgatatcccgatgcttagttacgtcgattatccaacagccatgggcaacggcattccagaagctaaggcccaagctaaatacatcacatcagccaacgtagaaggtggcattattgaaggcttaagacactggaaattaatctaagctagtgctatttaaacaccattccgttcgcacggcatggtgttttttattgcttatccctattgactgtttgctcctttcgcacggcatggtgttttttattgcttatccctattgactgtttgctccttcacagcttacaataataactatttactactaaatgattaatcaaaggagtcctattatgtccaaacattctttatttgctaaaaagaaaatcgatgcaagtcaatttaaaaatggcttacttgaacgaaacttaacagcggtcggcttaaccgctatgggggttggcgccgttgtgggggccggtattttcatcacacccggaattattgcggctaaatatgccggtccaggggcaatgttatcttacttattagcggccgttgtttgtgcgctagcagccctttgttattctgaatttgcttctaccattccactagctggtagtgcctatacttacgtctacaccgtctttggcgaattagtcgcttggattttaggctgggcactggtttcagaatatctatttgcggttgcttcagttgcggttagttggtcagcttattttcaaaatttaatggccggctttgagcttcatttaccaactgcgctttcggcagcgtgggaacctggtaaaccagccggtgttaatttaattgccggaattgttgttttaattgtcggtttcttactctcaaatggtatgcgcgaatctacccggattaataccattatggtcggcgttaaaattgccgtcatcgtcattttccttggcgttgccattttctacgttaaaccagcaaacttccaaccattcctcccttatggtgcctcaggtgtcttatctggtgcagccctggccttttacgcttatattgggtttgacgctgtttcaacggcctctgaagaagttattaacccccaacgtgatatgccaatcgggattatcgcctcattgttaattgcttcattactatatgccgctgtcgcaacagtattagtaggggttgttcactatacaaaattaaacgttggtgatcctgtggctttcgcattacaattgatgcaccaaaactgggtggccggcattatctcattaggtgccgtcgctgggatgacaaccgttttactcgtgatgacttacggtggaacacgtttaatcttcgcaatgagtcgtgatggtttattaccagccgtctttgccaagattaatcctaaaacacatgtaccagttgccaatacttggatttttgcagtcgttaccagtatcgtggctgccctcgtaccgcttgataaaattgccgaattggttaatatcggcaccctctttgcctttgcaactgtctcattaggtgtgattttcttaagaagaattccaaactacaatgagttgcctcaaggcttcaaagtaccgctctatcctatcgtgccaatcctctcatgcatcctctgcgtcctcttaatgacgcaactgcaaatgacaacttggattgtctttgtcatctggctcgttatcggattggtgatttactttagttatagctatcaccatagtcaacaaagaatgtaaggtattaaaaaaagcgtaacaactcaataatcaattgagtgttacgctttttgtgtggccatactatattttaaacgctctaagaatatccctaaactcaataaatcagcggttccacctgggctgaggtgcgcttcaattaactgagcatcaaattgccgtaattttcttctaacaagtaccatatcatctgtttcttgtaaaatttcagctgctactttttgaaccatttgccaaccatcaatgccacctcgatgaacaagattcatatcctggacctcagtcatcagcgttaacatcaatagtaagtggcgatcatcttctggcagcattctatatttttgtaaagttggtaaagcgatatattcaagtgatggataacccgcttctgcttcgccccgaattcctgtaaagccgtattctacataaagttgctcaccgtaactaagctgtgttttatctgtcatttgactaaaatcccgactcacaagtcccttggtcatattgcgaataatctcgaaaactggtttaaagttttgctcaactaatttagatagtgtcaaagtctgtccagctcgtcctattgcgcctaaaataaaagcataggaaaagttagcacctttatgcgtattgatttggctcgttgccagtaacatctgcttttcggcgtcttgaccaatttgtcttaatgttaagaaaagttgctgatcagaggtgctttggtaaccagcttcaatatacgccaataaatatgcttttagagcagcaatactctttaaaaaaagcggataatccatatcatcatgggcgccatttgattctggatcgactaatcctggcttaggcgctaattgcacttctgcaattagtgattggtatgcaagtatcgcaatcgcttttaaatcgctattcaagatgacgatgcctcatttccttaacaataaaatctagtgaatgattcaaatgctcatgggtgattagattaatttggttaatatcctgattcaacataccacgataaattaaccaatgttctgctaatgccaaatcacatctatcagtacttctaatacagatatctcgaaaataaactaggtattcctgtaattcaacaacaattgattttaaccgatacatctgactcttatcataaataaactgattgaattcagaaaatttctgtaaaacagcggttacgtcgcccgcttcattcaaacgcctagtctctaataacaattggtttaattgttcaaattcagccgttgtcattaaccgcatcgcctggcgcgttgccaaagcatcaagttctttgcgaattgcataaatttcataggcatccttcacagaaatccccttaacaataacacctatgcctggttttctaatcactaaatcttcatcggctaatcgttttagcgcgtaccgaattggtgtccgactaatattcatcatctctgaaaaatacttttcattaattctaacacctgcaggaatatcccctagaataaccgtttttcgaagagcctcataaattaattctttaatgggacgattttgtgagaggtcaagattcttagcgactgcattaacgattttatccatgccaatacacccttcttgtttttagcctcattatatactaaattgcttagcacttgttaactaccagaacaaaacgtatatttaaaattccgtctcaaattgaatatctattttttgaactggtacatcatagaaacgatcttcacgacgacctaagaaatcacgcgcctgttcaggaaatagtgcatacatcaaaacatcttcaatattatgtgcgtattgttgaatctctttttcaaattcaggtaattgcggtgctaataaatcagctggccgttgtgtaataggctgttggtcgccaataatcttagtaaccatttccggtttaatagctactggcggatgcccatataatcccttaacatagtccttgatttcgttaggtaccacttgatagcgttgaccagaaactatattcattaatgcttgcgtcccaaccatttgtgacaacggcgttaccaatggtggatagcctaaatcggcgcgtactttaggaatctcttccagtacttcttggtatgcatctgccatattttgggcctgtaattgtgcaagcaaattagaaagcatcccgccaggcacttggtaaataagcgccttaggttgaatatctttcaccttaggattaaggattccttcttctcgaaaacgatctcggataggtgcaaagtaatccgcaatttctgataatttagtttgatctaaatccacttcataacctaaattttgcaaactaattagcattgattcagtcgctggttgacttgtcccgccagcaaatggtgagattgctgtatcaataatatcagcaccggcctcaactgctttaagataggtcatttctgcaataccacttgttgcgtgagtatgcacttctaaaggtaaatcaatcgctgcctttattttagcaactaggtcaaaagctgtttgaggtgttaaaataccagccatatctttgatgcaaatcgaatcagcacccatgttagccattttaacggctaactcaacgtaataaggcacagtatgaaaagcactcgttgtataagcaattgtcatttgggcatgcccaccgtatttcttagttgcttttaaagctgtttctaaattacgagtatcatttaaagcatcaaataaacgaatgatatcaataccatttgccaacgaccgctcgataaaactttcaacaacgtcatcagcataatttttatatcctaatatattttggccccgtaataacatctgtagttttgtgtgtggtacttgtttacgaatctgtcgtaatctttcccaagggtcttcatttaaataacgaatacaagcatcaaaagttgcaccaccccaaacttcgagcgcatgataaccaacctgatccattgttttcaagattggtagcatatccgcaattggcattctagttgcaatcagactttgctgaccatctcgtaaaacagtttccgttatttctactttccgattcaccatctagcatcccaaccttcttcgattatttgttcaatttttagttggacttctaacagaccatgctgccgtgaacgactacaattttttgcatcctgaccacaaactagacaggttcgtcttggtgcccctaaagctacgcgactgacttgtactaattgttccgactcccaatacaagacatccaagtcccaaattgcccctaagggattgtcttgctcaaagcgaaccatctcttgcttaatctgttttggtgcgatatttaaaacaaaataaaattctggacctgttattgcttcaagcttgattaactggtcaacaagtttatccttatattgtttttgaatagtttcacaaaattgttgaaccagtccttttaatttaggtccggtttttatcgggcccggaatccgcatcgtaccacatagtaaagtcgcttctggatattttttaagcaatcttgtttgattaacaacacgctgctcacgtgctgttaacatctgacctaaatcgatggctggacctgttagttgccggaattcagacatttttgaccacatcgatcaatgtaccatcacggtattcaattaaggcaactggccgatccccatatttaataggtgccggttcacccgtaattgcataagctttttcttttaaggcttcaattgtcagttgtgggattttactatctttgaaagcagcaattaaatccgttcgcagtggattaatcgcaatcccaagttcggtaacgaccacatcgatactgctaccaggcgtaaccaccgttgtcacttggtcaacaatcgttggaattcttcctcgaacgattggcgcaatcaccatactcatcttgcaagctgtacttgtatctgaatggccacctgacgcgcctctcagtacaccatctgatccggtaatcacattcacattaaattgcgtatcaatttccaatgccgataaaattgcaatatccaattggttaattaccgaacctttgctcaaaggtgatgcatacatagcagcatcgatctcgtaatgttcactatttttacctagtgaaatcgctgatggatgatcaaaatcttgaacatcaattactttctctactaagccatcttctaatagttctgccattgcattcgtaataccgcctaaaacaaaacttgctttaaggttttgatcaatcattgcctgcttcaaaaagcgggtcactgctagtgctgccccaccggtaccggtttggaatgagaaaccatctttgaaataggttgattctgtaatcattttagccgcatactcagcaattaatagttccttaggattcttcgtaaaacgagttgcacccttggcaatcccctctggatccccaatcgcatcaacttcaacaacataatctaccaatgtttgcggaatactgattggtgtattaggatatggcatcaaactatcagtgatgattaccacttgatctgcatattgtgcatcaaccattgcataccctaatgacccacacgttgttttaccctttacaccattagcgttaccatattcatcggcactaggtgcacccaaaaaggctacatcaatatgaatatcaccacgttcgattgccctggcacggcccccgtgagaacgaataacaacgggatcagctagaataccttctgaaattgccgcaccaactttatcacgcaacccactagaagtaacgtgggtcacaacaccttgtttaatataatcaattaacggttcatgaacatttgcaattgaactcggtgcgattgaaagatctttaatgcccatttttgcaatttcggctaataccatattcatgatatagtcgccttctctaaaatgatggtggaatgaaatcgtcatgccatcttttaagcctgtttgaataatagcatcatgaatacttgctaatagcttactatctcttggtttaacaggatgtacttttttagtagcacgttgataatctttaatgttggttaattcgccagcataaacgccatattggcttgcgtattgatctggaatatcccgaccgacttgattaatcgtcattattttacctccatattagctgcttttgccattgccaaaacgcgatatgcccgttcaacaattggtttatcaaccatttttccgttaatcgcaattacaccagaaccctttgattctgcttcttcaattgcggctaatacttcttttgcattttgaatttcagcttgtgttggtgcatagattgcattaataattggaatttgtcgtggattgataacggattttccatcaaatcctaattgcttaatgagacttgcttcttgtcgtaaaccatcctcattatcaacatctgaatagacagtatcaattgcggcaatgcctgctgcacgtgctgcgtgtaaaatataatttctagcaaagaataactcttgaccgtctggataacgtcttgttttttgactagtaacatagtcttcggccccaagtgcaatcccaatcattcgattagaagcggttgcaatttcacgtgcatttaataccccttcagctgattcgattgcagccatcattttagtcgtcccaactggtatttgatagtgcttttcaactgattcgattgcatcatcaacagctctaatatcatcagccgtttcagttttaggtagtcgaataacattaatgccacccaaaatcatggcttcgatatcctgacggccaccactagatagttcattaattctaacaacggtttcaacactctgataatcaaatgtctttaaagctgagtagactaacaagcgtgccgaatctttttctttcatagaaacagcatcttctaaatcaaacataatcgaatctgcaccatataaaatagcatcccgtaacattgctggattagcacctggtacaaacatcattgttcttcttaagcgatccatttgttaatctcctcccaatcgtaatcttccttacctaggccgcgataaacagcaacaatggttctagccttaatcgtacaatccaaagcccctttatcgactgcgtctaccgtaacatttgtaatatcaaattgctttaatacagattcaatcatcgttctaatctgttgaccaaactgtttctcaacattactttgtagtttaatttctaagcctgtcttattgggacttaaggtaatcataatatcacttgattccattgtccccgctgttgcaatttgctttaattccattagccctaactccccttcaaaattgtataagtccgttttggcactagtttttgaaccgtttcccaatcggcctgttcaattgcggcacgaacgcgggttgcactaattactgtgccgtcctgtataagtcttgggataatttttagtttaagtttattgccaaaaacggccatcatttgttcattataaatttgcgtcactggcgataaaggctcttcacccacccaacgcgtttgaattgataaaataggtgcaataatttctagaaataaagtggcatcaactttagcctgtaccttagcaatttcctgatccgctttttcctttaaaaaataagttggaaacgtcatattggaaacaatatagttatcggttggcaatactacgattttaggattatcttgcgtcacttgacgaacgatctcaaggcgtattgcttctgaaaaagttgagcgattctcagaaacgacaaacagatatagcacatcactagctgcagccgctgtttcaatcaaatattgatgtcccagagtcagtggattagcgttcattacaatagcgcctatccgccggccttctcttttggcagttagtaatttctgacgataggtgtcaatattaggaaaacctcgttccaaaacaacaacagtatccgtttttacaatgactttaaaacctaatgattcaaaatagacagctgttactggttttgtataaacaaaactatgatatttttgaagctcttccagataggccaacaaatcttgaaccactaatgctagcaaattctgggactgttgattattcttaatcgcaacacatttgatgatattatcataaactgaaccagtggcgattaattcttcaccttcaaacaaaccaaccgtgtaatcaacttgccaatctgtagttaaaccggattcatttaatagcacttgccatttttgcgcttcttcttgattaatcgttaaccaaatccgcttactcgttaccatttttaattaaccgggaagaacttgattaataatttagctgcgacgaaaaggataaaaagtactagaaagacgccacccattccgaatatcattaattctaaagcagtttctagattagtccacattaagcttctcctcctagctgaaaaatgatagtaataacccaccggcaattactgaggcaatctgcccagaaacatttgcaccaactgcgtacattaatacaaagtttttaggatcttcttctgatgccattttctgaataactcgacttgacattggaaatgccgaaataccagcagcaccaatcattggattaattttttcttttctaaagatatttaataacttagcgaataacacgccacccactgaatccataatgaatgcgactaaaccaaacgcaataatcattaatgtttgaacattcaaaaatagaccagcttgcatcttaactgaaattgttaatcctaataaaatactgacaatgttcactaattcattctgagctgtgttggataaccgatctagtacaccacattctcgcaatagattaccaaacattaagaaaccaactaatggtaatgaaattggtgcgataaacccagccaaaatggtgataatgattgggaataaaattttagtcatttttgaaatattttctgctttataggtcatccgaatctgacgttcttttttagtcgttacggctttgattgccatcggttgaataatgggcactaacgccatataggaataggccgccactgtaattggtcctagtaacttcggcgctaattgattagaaacaaagatagctgttggcccatcggctgcaccaataataccaattgaagctgcttctttaatatcaaaaccgaacaacacagcgacaacaatggtgaagaaaatcccaaattgagccgctgcaccaaataataacataaatggattctgtagtaacggtccaaaatcaatcattgcaccaatcccgataaaaattaataacggaaataattcggtattaataccagcattgaataaaacatctagaacgccttctgttttggaaccacccacaacttgtgttaaaaccccagtccctgggaagttaacgagtaacgttcctaatcccatcggtactaataaggtaggttcatattcttttttaatccctaaatacatcaataaacaaccaatcagcatcatcacaatttgaccgatcgtaatacttgtaatgccttgaactaaggccgccataataagcccccctatttaatcgtaattaatgcatcacctgcattaaccgattgatttcgttctacaaatatttgtgatacttggccagcacggtcagcaacgatttcattttccattttcattgcctctaaaactaataatggttgattttcaacaacttgatcgcctggtgctaccaatattttgataacagttccgggcattggtgctgccatcgcatcagcatcagctgctgcttgattcacaactggttgactctctgattttgcttcaggtgccggtgctgcaggttgttctacagcttgtgtgactggtgccaccggtgttggtgtgccaccaatttcttccatttcaactaaatattcttgaccatcaattgatattttgaattttcttaacattatgcttcctcacttactctctttttgattgaacgtacaacgtattgttgctgttcttgtgtcgccatcaaacaactggcaatcatgctaacccgttttgcctctggattagacactaataatcgccgaacaataaattgactctgaggattctcaccactagcgatactggtcgcaattaagaccacctgtggatatgccttaggatcaaccgagacatatttaggaaccgttagccattcttcaattacaggttcttctggctgtttaagcggctcaggtaccgcttgcttttgttttttgaaccaaccaaacatctcatcatctcccctttcaattaagaatctttaattttgtggaatataaagtggcatatggcctgataaaataattgtaatcacaaaaattataaagacacctaacgcatacttagcagcttctttttgccattgccccatatccaatccggttaatcttaataatagatagataaaagcaaccaacgggctaagtaaatggaaggcttggcccattaatgatgctaaagccatatccatattactgaagccgtatgcacgacccgcctgtgctagaaccggtaataccccaaaataaaaaccatcatttgagataaagaacgcacctggtgcagaaataacagcaatgactaagccccagaaaccagctaattggtgcggaataatctgtgtgaaactttgtgccaatgcttcagccattccggtaccttggaataatcccatgaagaccccagctgcaaaaacaaggataacaacttgaacggcgtcccctccgttttcaccaattcgtttagattgatcttttaaagatggatagttaaccatcaaagcaatacatgtcccaacaaggaatagtagtaatggtggcatttcaatcgctgaaataaatgaccctgcaactaaccaaccaattaagacaattgtcaaaataccattaaaaacgaaattttgtggtcgacgcattttttggacttctggatcagtgacagccgtcatttcttcgatttcggcgtctgttaattgcttgacacctaatcgtttacgttcttgacgtcccatatgtggtgcaacgtagaaaataacataggctaatgctaaaatcattcctggtgctagatacgccaaaatactagcgtcaacatttaaaacagccattgctctagccgttggtccgccccaaggtagtaaattcataatcgtattttgtaaaataactaaaacgcctaagttcattaatttcatatcaagttttttatagattggaataaaagcagaacaacagattaaagtggtagttgtgccgtccccatttagagaaacagttgccgcaacgactgctgttgcaattaaaactttcatcggatcacctttagcaaagcgaatcatcttcttagtaatcggatcaaataatcccgcatctaacattattgaaaaatataatattgcaaataacaacataataccggtgttcgctgtggttttaataccctctaatacgaaatcacctagagaaccttttttggcaacacctgtcagcattgcaatgatagcaaagattagcggaataataactagtgctgtgaacggtgacatttttttcttcatgatgatatacataaaaacaataatcatggcataagcaataatagttaatagcatgttctaaccttctttactttatattttgtctttcatttcggaatccctatcatcataatagcctgttataaaacacaatgaaagcacttgcagaataaagaacatttaaaatacaatcgctagaaatatcaaataaaagaggtattaataagtcctagcaacttattaatacctctttattattttatatttatcaccacgataagacacgctctacctctccagctcggataatttgaagtcgctgtcccaccgtttgaatcactaattcaccattgtttgtaatatcttgaacgtatcctgtcaaagttttctcttcatttaatcggataacgatcttttttgttattaataaggaaacttcgcgatattctgccataaattctttctgacgatacgttggtaataatcgatcaaattctaataagatttgactaattagttgattacgagtaatcggacttgtattaggcaacaaaacgcctgctttttctaccaactggcttaattgaccgtcatctttaaagtcaatgccaatcccaatgacaatgccatgatgtggaattgactccgctaaaataccaaccaccttttgaccttcgtaatagatatcattaacccatttaatctgcgtttcaatctgacaaactgctcgaatagcacggacaaccgctactgcgctcaagggcgttagcaatgtcgcttcttcattcaatggtatgtcaggtaagagaagactcatatagattcctgtttgctgcggagaataaaatttacgctttaaacgaccataccctgctgattgttgattagcaatgatcacatctggcataacagatgcgttcaataaatattgtttagctaactgattagttgatgtcacaagattatgaatttcaagtctcttaggcttagctaaccctcgattaataagagcggcttctaattgatcagctaccatgcgcatacccttctttcagtctaccaatcgccaaatttcgtatcttgaagttgttgtaataatttctgatactcctgacttgtgcttagtcctgaagtaaaggtttcatcttgcaaattgttaaatttttcagcaagataataagccgttaaatagatcgtcagttttcgtttaacaattgcttctggatcaagttcatctgatacgcggtgtgaattaacaatcatttttgcaaattctttttgatctaattttaaattatcatctgatgattgagttgtcatatgatgacctccatttttatgatttacatttagaatagcacaaccaattcataaagaaattgaatgttggctttttattgttctttttacaaaaaaaggccaccaatcaacattttaatctgttgattggtggccttaaagttggctaacctaagtcagtccctttattttttatgttttttattcaaaatcttgtcgaacaagttgttgtcttgtgggttaactgagtccccactagccaccgcaaatgcttttaaggcatcacgttgtttgctgtttaaggactttggtgttaccacgttgactgtcactttttgatcaccattgcctgttccgtgaagtttaggcgcacccttaccacgtagacggaaaacagtgttcgtttgtgtaccagcaggaatcttcaacttaactggaccatggaccgtgttaacttcgatttcgtcccctaaagcggcttggacgaatgaaattggtacttcaacaaaaatctgagcaccatcacgttcgaactcatcactaggtgcaacgcggaagacgataaataggtccccataagggccaccatttgaaccggcttcaccttgaccttgaagacgcatttgttgtccatcttcaacaccggcagggactttcaccttaacggtatgacgttcttcttcgcgacctgtcccatgacaagtatcacattttgacttaatttccttaccagtcccaccacagacatcacatgtttcgcgtgacatcatacggccaagtggtgtttgacgttccacttggatttggccagcaccgtgacatttatgacacgtttcagcacttgtgccaggcttagcacctgaaccgtgacaagtatgacattcggcttcacggctgtaagaaatctttgtttccttaccaaagacagcttcttcaaacttcaagtccattcgatattgtaaatcagaaccttgacgtgggccattaggttgttgacgagccccgccaccgaagaatgaactgaagatatcgtcgaatccgccgaaaccttctgcgccaccgccgaagccaccaaagccttgaccagcaccagcgccgccaccaaaaccgccattcatgcccgcatgaccatattgatcataggctgctcgcttttgaggatcgcttaatgcttcgtatgcttcagttacttctttaaattttgcttctgcatcaggtgctttattgatatctggatgatattttttagaaagtttacgataggcttttttaatctcatcgtcagaagcgtcgcgtccgacacctaagacgtcgtaataatctcttttttcagccattgtgggcctccattcatttacttacgggttaaatctaccctaacaagaatagcataactgattgattaaaaaaagccaaagccctagaccatactaggttttggctttttttaacgttcttattctttgtcgtctttaacttcttcgaagtcgccgtcaacagtaccgtcatcagtcttagcatcagttgcgttaccttcagcaccaccagcagcttgttgtgcttcttgggcttgttgatataacttaactgtcaattcttgaacaatttcacttaacgcatcgcgttttgtcttcatgtcttcaagattgttttcttgttgtgctttaactaattcttctttagcatcttttgctttttgtaattcttcgtcagaaactttaccttcaagttctttcaaagtcttatctgtttggaagattaattgatcaacatcgttcttcaaatcaacttcttctttacgttttgtatctgcttcctcgttttcttgtgcttctttcatcatacgatcgatttcttcgtctgacaaaccagagttactcttgatagtgattttttgttccttgtttgtgccaagatctttagcagaaacgttaacaataccatttttatcaatatcaaacttaacttcgatttgtggcacaccacgaggtgcagcaggaatatctgttaattggaaacgacctaaagtcttgttgtcagcagccattggacgttcaccttgtaagacatggatgtctacggcaggttggttgtcagcagcagttgagaatgtttgggccttgcttgtaggaatagttgtattccggtcgattaacttcgtgaagacaccgcccattgtttcaatccctaatgataatggtgtgacatcaagtaaaacaacgtctttaacgtcacctgagataacgccaccttgaacagcagcaccaagtgcaacagcttcgtcagggttgattgagtgatcaggttctttgcctgtccagttcttaacagcttcttgaacagcaggaatccgtgttgaaccaccgtttaagatgactttgtcgatttcgtttgcatctaagccagcatctttcaaagcattcataactggtgcttttgtacgatcaactaagtctgatgttaaacgatcgaattcagtccgtgataatgtcatttctaaatgtaaaggaccattttcgccggctgagataaatggcaagctgatttgtgtgcttgatacacctgataaatctttcttagctttttcagcagcatcctttagacgttgcatagccatcttgtcttttgataagtcgataccattgtctgatttgaagttttcaactaaccagttcatgatagcttcatcaaaatcgtccccacctaaacgtgtatcaccatttgttgataatacttggaagacaccatcgcctaattcaagaacagaaacgtcaaaagtaccaccaccaaggtcataaactaagactttttcgtctgtttctgtcttgtccaaaccgtaagctaaagctgaagctgtgggttcgttgataatccgtttaacatctaaaccggcaatcttaccagcatctttagtagcttgacgttgtgaatcgttgaagtaagcaggtactgtgataacagcttctgtgacttcttcaccaagatagtcttcagcgaatttcttgatgtattgtaagatcattgctgaaacttcttgtggtgtgtatgatttgtcgccaacagttactttgtaacctgcttcgccaatgtgacgtttgattgatgcgattgtatctgggttagtgattgcttgacgtttagcaacttcaccaacttggatttcaccatttttgaatgatacaacagatggtgttgtacgagcgccttctggatttgtaataattttgggttgtccgccttctaatacggcaacagctgagtttgttgttcctaaatcaataccgattactttactcattgaaaataccctctttttttaattttttaaattttattattgtgcaactacaaccattgctggtcgtaaaacgcggtccttcaaataatagcccttttggaagacttgaaccacggtgtcagctttttgatcaccatcaaccgcaaccgtttgaacggcttggtgaatggtcggatcaaaggcttgaccttgcgcctcaatttctttaacaccatggtcttctaaagcatgtttcatatgatcatatgtcatttgaacaccctttttaagaccttcatcagttgcttcagctgccaatgcgcgttctagattatctaaaacgggtaagacatctttggctaatgattggccatcatattttaacaagttagcttgttctttttgattgcgcatttggatgttcttaatttcagcttgtgaccgtaagaaactatcttccatagcgtcatatttcttttgaagttcagctaatttatcatctgcttcttcaacaggtgcttgtgcttcaattgtttcttcaacttcatcagcttccataactggttcaaatggtgtttcttttttaggcgtttcttctacagtttcttcagttggcttttcttggttttcagccttttcttgctttgtcaaacaaacacgctccttttaagattgattatcatcaaaatctgcataataatcaattagtttcttcgctaattcttcgcggaataaatcgagtaacccgatcatgcgcgaatatggcatgctagtgggacctaataaagcaatcaatccttggccgtgttcaccaacatcataattaacagtcattaaactgtaattcttcaataaatcattggtcatttcatcgcccaaacgaacctgaacttggctattggcctcacccggtgataactctagcaacttggctagatcgtccgattgattaatgatgttgtagattgacttcaactgtgacacatccgtcaattctgagaagtttaataagttcgattggccccccacatataaacgttcctgcgaggcctgttttaagacatcatcgaagatgtttaaaaagccgcccggtgagcccatgtattgcattaataacgcaggcacctctgttttcaacttctgactgacaacggtcagcggcaatccgattagatgatcattcacgactcgaatcgctttttcaagttcatcacctgaaatcgcgtttggaattgtgaaaacctgattatcaaccgttccggcacttgtcacgataatcgccattacctggtgattaccaagtggcacaagtcggaaacctgtcaaccgaatctctgccatctccggtcctaacgtaatcgctgtatagctcgttaggtttgaaagaatattggcagattgtgaaacaatctcgtcaatcttatgataatggcgtccaaatgattgttgcacagtcgcaacatccattggatttaagacagcgggctgaatgagatgatctaaatagtaacgatagcccttcatagaaggaacacgtccagaagacgaatgcgtcttctctattaaaccgacattctcaagatcagccatatcatttcggattgtcgcggaactaacgtgcattggtagttcagacattagcttcttagaacccaccggctgaccactctcggtaaaaagacgaataatttctttcaaaatcattaattgtctttcggtcagcatgttatcacctctttttagcacttgattattacgagtgctaattacaagtattaatatagcaagaacgtcaaataaagtcaagaattgaactgtaattttcacggatttaatgaaaatgggaccaaagaccgataaaaggccacacccaaatgatgagtgtgaccttttcaaagattgctatcgataattctcgtgaaattgttgtaaatcagcgactgaatgactcgctaatattgattgggctgcttggactttttcaattggccagtggtaccaatcaattgcttgcagggtttcaatgtcagctggtgtaaaccgtgactttaaaatccgtgctggattaccaccaacgacagcgtacgctggcacatccttaaccaccaccgcaccggcagcgataatcgcgccctgcccaatatgaacaccaggcatgattaacgcgcgcattccaagccacgcaccgtcttcaatgattgtatcgcccttgggctcataagaggccgcaatttgttctgggaacggataggcgctaatccaatcactgtgatgattatgattaccgcccatcaaaataacaacgccactggcaatgcaaacgtaacggccaataattaggcggtccaattgccaaccaaattcagtctgtggattaaataaggcgcgtgaggcatcatcgccccaatgatatcgaacgcagccgtcctcaaaattctggtgatcataataccccgaaaagtaagaataatcgccgacttcaattaatgggtttgtcaccaaatcctttaaatattttgtttctgaccaatgttgataagtattcttgtccatttcataaaacctcgcttctaagtttttgttatctgcttaacttagaagcgactgcttgtgaaacggcccgtaattgtaaaaggtgtctaaccaaaaatgatcaccatcctatttgctcggaatataaccggtttgaacgcacttctttttaacgtgcttttcaagctaactttctgcgcttagcttcgtgcgtcaaataatcgactgcgtcgtttattcgccccactgtgctaatgctcaaaagttgaccaagcttgaacacacttctttctttaacgtgctttcatcaacaacttcctgcgctttacaacacttgtcaaactgacgattacatcgtcaattcaccaagttatgtaaatgctcagaagtaacccgttgatgacgcatttcttttctttaacgtgctttccaaaccatattcctgtgcctagcgtcacaagtcaaacaattacttccagcaatcattcgccttgttatgctagtgctcggaatataaccggtttgaacgcacttagtagctgtctaacaagaattcctggaagacttcgttgcctaggaactttcctgattcagttagtcttagccagtcgccttcttgttttaggtacccttttgcaatctgactggcgactgtttcgccgtagatgttttgtagtgggtatctgaatttttcttcaaagtgcttaactgagacaccttgcattgtccgaagtcctaagaagagttcttcttccatctgttcggtcaggggaagcacgtggcgttcaatcactggtactttatgtgcttgcagtggttctaagtattgttggattggcccaaaattgtggtagcggtccttgcctaaatagccataagcaccggccccaaagccgaaatacttttcattccgccaataggttaagttatgtgcagactggtagcctggtttggcaaaattactaatttcgtattgttctaaaccagcttgttggaaactatcaatcgcattttgatacatgtgcgcttcaacatcttgcgatggtaagcgtaacttgccctgacgcatcaaattatagaaaatcgttttcttctctaaaattaatgagtaagttgaataatgcggcaaatcaagatcgattgcctgtttcaaactgtccataaaatctgcttcgctttgttgcggtagtcggaaaatcaaatcaatactgatattttcaaaccccacttggcgcgcattagcaatcgcccggtaaacgtcagcactacgatgaatccggccaatcttcttaagaatgtcatcattaaaagactgcacgccaatgctcaagcgattgacaccgttatcctttagtacctgcaatttagcggtatcttgtaaatcattggggttggcttcaaacgtaaactcgccgccatcataaggtaagtactgatgaatgccatccaacaaacgttggagttgggctggtgagagtgtcgttggtgtgccaccaccgacataaatcgtttcaattttctcgtctgggtattccgccattactaattgaaattcgcgaattaacatgtcaacgtactcatcaaccggttgaccttcaatgaagaccttgttgaagtcgcagtaataacaaatatgttcgcaaaacggaatatgaatatatgcgcctgccattaatgttgaccctctaatttctcaaaataagtccgggtatcagcttcatcttggtggagttggtcgatcaacgcttccgccgaatcaaacttcacttcacctcttaaatactgataccactcaactttaacttgttcaccataaatgtccgcactaaagtcgagtaagttaatctcaactgtcacgggattattggcatggaacgtcacgttccggccaattgacgccatcccccagtaccattggccgcgaaccaataagcggaccgcataaatcccaatgcctggtaaacgttccggtttttgactttcaatattagccgttggaaagccgagttcccgcccccgtgcttcaccatggacaacttccccagtcgtttggtaaacataacctaacaactcgttagctgccgctacttgaccttgatccaaattttcacgaatcaaagttgaaccaatcttatggccttgatagtcatgttccgccaccgtcacgatttcaaaacgatctttggcatacgtgctaagggtctgcatattagcgatgtcttttttaccataggtgtaatcaaacccagcgaccaccgttttcgcgtggagcgccactaagtattgatcgacgaaatcttggggtgccaacttggcaaagccatcgttaaaatggacaacatataaaatatcgacacctaaatcagccattaattcttgcttccgttcaactgtcgataaataacgaaaatcggcttgattgacatttcggtaaacaatcgcaggatgaatatcaaaggtcatcaccgctaatggtcggttctgttgcaccgccaaatctttggccgtcttaatcactgcttgatgtgcccggtggacaccatcaaaaaagccgagtgctaagacaatttcttcggctggtacttgttcttttgaatagggatggattaattcaatcacacgcatttttttcacctagtttttttaatgagtcccttggttttgtaaatacattttatatggtcgatagagatgttgttttgcgttagccacttgatacaaggccttgatgtgcccttcgtaagttaaggctaagatttcttctgtttgttctgggaacgttaagaagacaccgtttaaaattttggcccattgatcatcatcaagcgcaatcttgacgttttcttcaaaaacatgatctaacggaatcaaaatatccgctaattgaccgttatcagcagcttcagccagttgtgccaaggtaacgcaactgccaatttgaatgccaccactcttaagacgcgttaaatcagacatgactgccggtaagcctaacttacggccaaaatcgacagctaaagtccgaatataagtcccttttgaacagcccgcaataaagcggaatgtttggcgacccgtttttgcatcgaattctggttcgccttgcaagtcaaattgcgtaattgtaattttgcgttgtgggcgttccacaggatcgccggcccgtgcataatcgtatagacggcgcccgttaacttttacggctgagaacatcggtggaatctggattgaatcccctagaaaacttgccagtgtttctttaattttttcggttgaaattggttcagctaaccgttgttcttcaacgacttcaccatctaaatcttcggttgtcgttgataaacctaacgtaatttcaccggtataaactttaccagagtgcaccaattggtccactaccttggttgcttggccaatacagattggcaaaacaccatctacattgggatcaagcgttccagaatgccccacttttttcatatgaagaatccgtcgtactttaaaaacgcaatcgttgctagtcatgccgcgttctttatataagggtataatgccgtccataagtaatctccttttaactattaactaaaccattatagcatagagtgctggctcgaacgggatttgctttcctatgcgccacaatttatcattaacgcacaaaacgccgggacaaccattaagttgtctcggcgcttattttatgaaggtaatttctttattttgaagctgactatcgatccgggcactttctaattcaatagcaaaaataatttctctttccttttctgccttagagagactctccatatagcccggtacctgtgcttgataagcagccgctacatcactaaaactatactgggtgcggtataccttgagtcgattgctggtaatcctcaacccctcactcgtgggtagcgtataaattgcagctcggcctagatccagttcactcactttcggtgcttccgggtccgttccaaaataccagatattagggacatcattgagtgtaacaaaactaatctgtcgactagatggctgtccctgttcgtccgccgtacttagcaggattgtattaaattgcttaacgtaattgcgaaacgcatttaagttattctgatatgtctctgaactagctgtttgattatcaatataagcaatcgcatcgtcaattgtctctaacaccggattggcttctaaatagtaaagaatttggggaataatttgcgatatttctcgttgatgataataaaactgcaaccaccgattagaggccgataaagcatccgtataacgcttatccagctgtctatgatatcgttgaacaatattttttaaagggcgatgttttatcagtttttgaaagattgctaaactcagtagaaacattacgattgcaactaaaatattaattttaacaatccccatcattggccagccttcatatgccatcaggcaatcatataagattactaaaaaaacggttagcacagccgcacaaacaatcactaagcggcgtttaaaaacccgtcgtttatgggtcatcgcttcgattattttttgccgctctttcatagttcgttcgcgggcaatcatctcatctatgacagcttgatcttcattagaaatcatcgttttccccctcaaaggcatcaaagcgctgacgtaactcataagtcccaacatcggcaaaatcgggaataatgatattttggcgctgcttacgcatgcttgctgcaccatatttagcagtatacatctcttcggcccaggctaatcgcttctgtaaccgctgttcatcaaacgttttagcgataccctttctaatccgatactgttttactttattcattaaataaagactgataaagaaaactgaaaaaacgataatatagcgcaagaagatataattcgtattctgtaataattgtttaaaggcgacccgattaaccggaatgattgtttcacgggttagatagataccgactgttgccgcggtgggaatcagacacattacccagccaatgccaatcaacactaattgacgcaaacgatgaccagtctttttagacgtaaaaaaccaatcgattgtaatctgatcttcacttaattgatgacgaatataatctggtttactcatctgaatcctccccttctcgttttccggttacttctgtcgaacgtgtcggtgatttccaaacgccagcatctttgcccctgatgatttggcgaatggttggcacaatctcaaccgctacggtatacgtattaaccatccaataaatcaagatataccaaggtgcaaaggcgatatacttcaacgaacggcccccatcgttaaaataggaggcttgcaccaattgaattaatccgaccaatatttcaatcgtgataaaaattgctgcaatagacaaactcgaaaggagccggtgccaatcctgattaattacgtaaccaatttgaaggacaataaaagtcgccatgcttatccaataaaataacgaccaaatgatactcaaaccataatcaatgataatcgggaccatcgaaaagtgcttaattggatgccgtaaaataccaaacgatttcgtcaagagcacgtagatcccgccagaagtccatcttcgccgctgattaacgagttccggcagtgtttctggcacatccataaaaaaccgaatgtgcggtgcaaaataagcctgccagcctgcggtctgcatatcccatgaaatcgcaatatcttcagttggttgttctgcttgccaaccaccaacatcaatcaccgctgccttacgatacatcgtattagccccagaaaaggcaaacaatccaccataagaaagctgcgagcgtttaattaagccaatgattgaattcaattcattttgctgggcttctgccactagagttgtcttattaatcgacaacatattgccggtcacagcacctaattgactgccaccttcccgttcgaaataatacatatacttccataaggcatcaacttctggtttggaatcagcatcattggacaaaataaattcgcctttggcaaatcctaaagcactattaaagccggctgccttgccccgattattaataatcgtgaccgttcgtaaccgttgaccgtattttgcttgtaatgtttctaaaataatcccagttttgtccgtcgagccatcattgacaacaattatttcatattgatcggttggataattcatttgggttgctaaatgatcaatcgtagcttcaattgaggcttcttcgttatgtgccggcactaaaattgtgatgaacggcgtccctttttttagataacgaggttgatcttccttctccattaatagccaataatacaaactagaaacaataaacgatagtcccccgataatcggataagaaaccagtgtgtagattaatatttgggtgaaatagtctatcaatagcatatatcaggcctcatttcagagcgaattttaatcagctaacaatgaaatcatatcaacaactttcctcgataagtcataaaataatcctaattttattttaaaataactgtcaataacaatagttgtctataactcaatagtaatatggtgcaatctaccatgtcaatttaagggattatggttttcataaggtcatcaaaataaaaaaagagcaccgacgaatttcgtcggtgctcttggtcacagcctaacgctgtgcttcatcttgatgtaacttacgcaataattcgtcgatatgttcaccataacgaactgaaccatcttgttcaaaggtaatttctggaatcttgtataatttaattcgttggccaagttcgctacgaatcaagcctttagctttatccaaacctttttgtgctttttcagcatcactggctagattagacaagatactgtaataaaccttcacgtgttgtaagtcaccactcagattaatatctgtaatcgttaccccttcaactcggggatcacgtacacgttttaataaaatatcattaacttcacgttgaatttcttgttcaacacgaccgacacgatgtttcatctgtagtcctcctgtaaattaattatttaacaggtacttcttccatcacgtaggcttcaatttgatcatcaatcttgatatcattgtaatcttcgattgtcacaccacattcaaagccggttttaacttctttaacgtcatctttgaaacgtttcaagcttgaaagtttaccttcataaatcacgatactatcacgaatcaagcggacaccactatcacgttggataacaccagtatcaacgatacaaccggcaattgtcccgatcttagaaacattatatgtttcacgaacagttaattgacctgttactttttcttcgtaaactggttctaacatacccttcatagcagcttcgatttcttcgattgccttgtagatgattcggtgtaaacgaatatcaacttgttcagcatcagcttggatcttagcttgtggtgttgggcgaacattgaacccgatgatgatggcgttacttgcagcagctaatgtgacgtcactttcgttaatcgcaccaacggcttcatgaataatattcacgcgtacgccttcgacttcaatcttccgtaaactaccagccaaggcttctgttgaaccttgaacgtcggctttgataataacgccaacttcttttaattcaccttgtttcattgtttcaaacaagttatctaatgtgacagggtttgaacggctacgttccttcaagagggcccgtttagcacgttcttcaccagcagcacgagctgttttttcgtcttcaaagacaacgaaacgatcagctgcttgtggcacatcatttaacccagtaatttcaactggttctgatgggaagacttctttaacacgacgaccgcgatcatttgtcatgacacggacacgaccaaaggtattcccaacaacgattggatcaccgatccgtaatgtcccttgttgtactaataatgaggcaacaggtcccttacctttatcaaggcgggcttcaataactgtcccaaccgctttttgatcacggttagccttcaattcaagcacgtcggcttcaagaagaaccatttcaagcaagtcatcaatgttttcaccagttttagctgagatcttaacaaagattgtatcgccaccccagtcttcaggaacaaggccgtaacccattaattgttccatcacgtggtcagggttagcacctggtttatcgattttattaaccgcaacgataattggggctttagcagccttcgcatggttaatagcttcgattgtttgtggcatcacaccatcatcagcagcgacaactaagatgatgatatcagtaatatcagcaccacgtgcacgcatgttagtgaaggccgcatgtcctggtgtatccaagaacgtgattaaacgatcgtttaacttcgtttggtaagcaccgatatgttgtgtaatcccgccggcttcaccatcagtaacgtgactgttacgaaggttatccaataatgttgtcttaccatgatcaacgtgacccatgattgtgacaactggtgggcggctcacaaggttagcatcactcttagcttctgtttcaaagactgaatcaatatcagcgatatccacttcaactttttgttctgcttcgataccgtaatcagttgctaataattcgatcgtatccttatcaagtgattggttcatgttaaccataatgcctaacatgaataacttcttgataatttcagctggttcgcgatgaatcttcttagcgatatccgcaacgttcatcccttcagagaaaactaatacttctggtaatggacgttctttacgttgtggcatttccttcttagctgcgttttgttcagctaattgttgcttacgtgtcttcttacgtttcttattgaaacgttgttggctattgccgtagctgttatagccaccgccacgttttttatctgggccaaagttctttggcttgcttgctgtattgtttgatgctggtttagaagcactaacagtattagcttgcattttttgttgcatttcttgtgcagaaactggccgtgatggtgtcgttgctggacgactgtttgttggtcggttattcgtcgtattaggacgtgcactattgttattgtttggacggctgctacctaatgggcgaccatcttttgtaacggttggtcttggactgttagtcgttggacgtgcaccgtttgttggtttgccgtttgatgggcggttgtttgaagcattgtttcttgttggacgtggacgacttgcttgttcacgacgcttcttttcgtctgcttcacgttgttcacgttgttgttgaatccgttcttgggttctttgacgacgtgcattagcctgtgaaatctgttcttgtaagctcattggatggttagcgcttgttgaacgattttggctattgttatttggccgactgtttgtgttaggacggctgttattaggacgagcgctattgttgttaggacgcgcattgtttgtccggttttgaccattgcttgcttgaccgttacggttagcattagcttgtggtcggttgtttgaatgttgcgctggttttttgtcggcttctgggcggcgacggatagcagttttattgatcttgatcttaccactttctgatttttcgctcgctttaggtgcggcaggtgttgctggtttacttgcagctggtgttgcttttgtttggaaagcagcccgcaatgttttttcttgattatcatcaattgttgccatgtgattcttgagatcatagccttttttgttggcagtctctaaaatgtctttgctagcaacattaatttctttagctaattcatagatacgttttttacccatatcttcacgctcctttattatcccagtagcgttatcatctttttggcaaacccagcgtcgacaaccgctatggtggctctatgtaatccaattgcttgggttagttgggccgcggtgtaggcctttgtttctgggattttgtagaaatgactcttatcagtcaatttcttctgcgtcagtgggctgatatcctggccgataaaaaccaatttagcttttgattgctgaatggcttttaggacctgttcttcaccactgaccagttgccttgctctcatacaaatgcctaagagttgcaataaacggtctggttgttcactcattttcgttctccaaatagttcttgacgggccttttgatggtcaacatactcgaacaattccgtgtaaaaatctgctgaaacatcaatgccaaaagtcttttctaagattttcttagcttgcgctgtcttaaccgcatctggttctaatgaaacataggcaccgcgaccagatttcttaccagtcggatcgatactaatttcgccttcagcggttttaacaattcgcaccatttcttttttaggcttcatttcttgtgaaataacgtcttttctcattggtacttttctttgtttcatcatgaacacctcacttattcttgtggttgttcttcagaatcaacaacagtttctgctggttgttcgatgtcttcagcaacttctgccgtttcaggggctactgcaactgtttcttcagtagtctctggtgtgattgtttcttcttcgaaaccttcaaccacggctgattcatcttcactatcatcgccatcgacaaattcgacttctgattcaggtttgatgtcgatcttgtaacctgttaacttagcagctaaacgggcattttgaccttttttaccgattgccaatgacaattgataatcagggacgattaccgtacatgtatgttcgttgccatcgttaaattgcacagcgatgacttcggctgggttcaaggcatttgcgatgtagtctgaaggatcttcttcccacttcacgatatccatgttttcgccgtgtaattcattaacgactaattgaacccgttgccccttaggaccaacacatgttccgactggatccacattaggatctgttgaacgaactgccatcttagtccggtcgccagcttctcttgcgattgacacaatttcaactgtgccgtcataaatttctggcacttcttgttcaaataaacgttttaccaaatcagggtgtgtccgactaacaaagacttgagggcctttagttgtgttttccactttagaaacataaaccttgatccggtcatgtgcgttatacacttcgttagggatttgatcttgcttacttaaaacagcttcaatcttgcctaagttgacgtagataaacttgttatcgcgacgttcaacaatcccttgcataatttcgttttcgtattggctgtattcattgtaaatgatacttctttcagcttcgcgaacccgttgcataataacttgcttagcagtttgggcggcaatccgaccaaaatccttaggtgtcacttcaaaacgaattgtatcgccaacttcatatgctttgttaatttctaaagcatcttgatagctaacttccaaacgtgaatcgaaaacttcatcagtcacttctttgacagcataaacgtggatgttacccttcttttgatcgaattcaacttccacattttgagcttgaccgtagtttcgtttataagccgaaacaagcgctgcttcaagggcttcaatgacaatttctttcttaacacctttttcttgttctagcgcatctagggcgcctaacatttccttgctcatgtaactagcctacctttactaaaattcaattgctaagcgagctttggcaatttccttgcgattaaatgtcacttctttttgacgcgttttaattttaatggctaatgttaaggtctcttgatcaagcgcctttaatattccttgataaatcttctcgccatcaacggcttgatataacgagatatgaatgtattcgccaagtgcattttgaaaatctgcttccttcttcaaaggacgctctgcaccaggtgatgaaacatctaagaaataagcctgcggaattggatccgggtcgattgaatccagtttctcacttaacgcatcgttaactaaggcacaatcttcaaggtcaatgccgtttggtttatcaatgaagacacgtagataccagctactaccttctttaacaaattcaacgtcgactagctcaaaatggtgttgatctagtatcggcacgagtagatcatgaactgtttccacaacggtactcaaatgattccctccaattcatttatatattcagattagacgtgctccaataaaaagagtgagcatttctgctcactcgctctgaagtatctaattactgataacaatataccatatttttcatgaaaatacaaatggcaagcggttaatgattatatagaagaaagaagattaaagtgattagaatcgcctcaattttacaatgtgctgcatgaaaatacgcattaatcatcttcaatgaagaaatcttcatcaatatctatacttcaaaagttctaatagcccctttttcttcttcacttaactcaaaggctgtcataacagcttcatcaatttctaaattaagtttagtaattaaaactttatcactaacttctttttccatctcagcactaagactttgaacaagaactccaattcgattttgtttttcacttgttatatttggaattgggaattctccaagctcgttaactttaaactgtggaaaaactcttctttgaaacttatcaaatttcatcatgaaccaaagtgtcattggcttagaattaatcacaccaagtaaaaagaacggatttacctgaatatcagtaattattacagaatttctatcatttattatatcatcatttgtgtaacaggcttctatcgcataacttttatacgtcggaatctggcgaaccaaaattcttggatttttaaataatttaggatctctcattgctgcaaggttctcaccgtattttatatactcaccattccaagttatacagtaccggcttacattttcaccatcaagatatttacgataagtttcatccacctgtaatttagaatgatagattctatttttcttatcctgagtagacattttaggtttacccttgcccgtttcataagccataattcccgctctgactgttgcgatttccggcctatctaatttatcaaaactagctatcttataataagcgttaacagctgttttatatttaaccattgaaaggctgaacatagggggatctccgaagaaagtagaattgaccttacctataaggttaaattcacccgccttcaattcagatacttctatctcgttaggcttattcttcttgaagaaaacaatacaattatcgacacttgcatccgtaaagattttgtctaaggagttaatcaatacaacatcactcgttttttttgtaataaattctcgaatttttgaatttgtttgaatcgtcaaaagattattaggaacaatataactaaaactgccaccttttcgcatcaatttataagcaagttcgataaaaattgtataagtattagcttgatattcactcactttataagtagatcggtaatattttttcatctcctcactaaatgactgatttcgggcaaaaatataaggtggatttccaataattaaatcaaatcctgtaaaatttccatcctcatccagaacttcagggaactccattcgccactccaatccctttgcgaacattggattttgcatagctgtatcaaattctttttgagcttccaaacgttgtttactaacttcgtcaaatcgtctttgttcatccttactattagcgaaaaggttcattggagctaaatttctgagttctctttctagctttttaagacgttttaattccggatttgtagcagtatcatcaaatgaacttttaatttttgtgattttctgaaaaatatccgctttagttcgcttattattagtatttttgtactctttaactaattctagatattctttaaaatcattttttctcatatcaaaactaaaattaaaatcaaacttatgtagtaagctatcaccaactttaatattaatatcaatatttggcaatgtaactagctcacctgactcatcataatacgaattttttagtaattctatccacagtcgtagacgacaaatatttgctgagttgggatttatatcaactccaaataaagaattttcaatgatattctgcttttggacaaataaagctttttgaattcgagtagatggtacactttttgcataatatgaaaaattattccccgaaaaatcttgcacaataagttcgtcattcgccacataagtatggatatcatttaaaatgttcccctctgcatcaaaaagacaattcaactcatttttaagtgcaataatctcattaagtatcgaaaccaagaaatgtccagatccaacagcaggatcgcatattttaagctgatcaatgacattacttacttttctagctgtttcaatacttctaatcttaaacttgatatcctcaatcgtttgagtatcccaatctagttctcgatttactttatcaactacagtcatttgaagtgcacgtcgtgacatatacatagtgattttccctggtgtaaagaatgcaccctccgcataaccatttattttctcaaaaataagacccagcacggaagcatttattagttcatttttagaattttctttacgtgtaatagttgttgaaaaatcataagcattcaaaaattcaaaaagatactcatgaaaatccatttttcctattttgcgttttttgtcgggcccccttaatatagttttactataaatatctatattttcctcacgtaactgatcaatagttataccatctcgacttcgttcaagattactctcctcaaataaagaactatttaaatatgggatatagccaaatttttcttctaaacgtgggtcacgttggtcatgtcgctttgcaagaattccaaaaaataaatcacttaaattaccataggattttattttttcataagttaaaaatttataatttgcatcatcattaaaagcaaccaactgagattcaagtagtttcaaaaataaaattctattaatccaaaccaccgcgagctgaatagcattatcatattgtttatcttcaggcacatcattttgttgcaatctactaattatagactcaacaagtgaagcatattgcctcttttccggctttaatcgtttgataactttggtagtactttcttttgcttcttccaaccccattatatataaaagttcatcatagaaagatttattaagtttattcgaatctgtaaatatttctttatttaatagattttctgctgaaaaaaaacgataaagttgagttaatttgcttttcttaatttttattggtctatttgattttattgtatcttttaaatcaaagtgtgcaatcgcgattcccttctcaatagctttatctatctcaggtttgatgacgttggtataaagaaaatctgtacttgagtcagaaagctgattaagctgccacttttcatatagaacacgaagttttttattattgtaaaaatacttttcaagctctttagcttcaattgtgaaccatgatagtccattagtaataatcgctttcttaatctctaaatttttagaagtaattcgctcttggaggtaataggccactacctcttgaaaagcttttgaattaaatttagatgtagtcatcatttcgttaagattgtttaaacgtttagtttcaataattactccgattgaacttgaactatcttgaccactataaatagcgagatcaattcttttactagtattaataaaatttttaggaagtaaaacctttaaaaaatctgaaatgatatttttttgatactcttctgattcatcatactttgcctgaatcttttcgagaaattgtactagatttttttcaaatacctttttttcttcttcttgaggcataattgcttgcacatttttactcatgctctctttgaatgttaaccgttttacagacattaacgaatcctccagtctgtatagaaaaagtcaaatgaatttgactttttctatacataatacttgcaatcatgtaagcacatctaattgatttttttatttaatattaagtattccaaattatatgaaacattgaaaatgttcaatatacaaaaacctataatttatcaaatgtttagttttcattatttaccgattaatagaatttctttaatactattggcttctttactaatcattaaaatctatttcattatactcaattgcatctttcttcatcattcccattttatttccatcaaacaccggctcatccgccatatcataaaaataataaacctcattactatcaccagattcaaatacggcctcatttgtttcaatgattacttctttcattattaaatgagtatacagaacatacttaataactcttattttcttatggagtaacgttatttccagtgaaacttctgcaaaaatactctgatctttaccaactaagtatttagctttcttcacatttgccttttccttatcaaacgtaaaccgataggttttatctgatttcatccttacaagtctattattaacaagactttcatatagtattttaatactaaaaaattccgaattttttatttcataaggaaattcaaattccaaattaaatttcttctgtaataatttaagcacttcataaaatcgattattcttttcaaaaacggtatattcctcagaaattgttccagttttcttacctaatatttttaaatttcgtttatagaaagcttcgattaaattttgatgctcaaaataatcattaagagtttttaacttgttaaaatctaaactggcctttattttcaatgatgatttcttttcattaattaataatacaatatttaaaatccccggatttgccagttcaaatttagactcctcataacttgcatacggcattctctttaatttaagctctctcttttgattcccccaagccacctcaacggaacctgcttcttgaaacttgataggtatcaaaagctgatcttttatttcactatttaataacttaattaacggtggctctttcatttgaagttgcgaatcaaccttgtacggtgtctgcgttctatgcatagcatctaatagctcatcaatactcgtaacgtgtaacccttcaaactcaaatggaaattttattctaacagtaaatgaaacttcattttcattatctttgggtgtgagagcaaacatatttggtgaaatttctttatatttatatccttttggcgcaccctgattaagatatttttggattgctattttattgtgtccaactacattttccttattaaaaattgaattaaattttcccatgttgttcaccaatcctcagctaattcactataaacaataattttagatattaatacatctttatcatttttggaaattcgtttcccactcttttttgaacgaatatacctaattaacctatctcgattagtaatattatcgacaaaaatatatctaatatcatctacattgaaatttagcataccctttttagacttagtaattgaattagaataaatattggaagtcttctcagccataatttcgtccttatccactaacatcgacggtagctcacccgtttctaatattggtacatatcgccattcatgttcatcatgaaaattcttctttatttcatcatcactagttgcacttcttttcatctttccggttattggtttaacgtacgttaaataatcaattatatagtccgctgcaggattgttctctaattcatcgtttgctgatccgagtaaatcattcattaattttgataattcttgcacttggacagatttattatttaaatattggataggttggataccatttcttataccaaaatccttggttaatcctataccaaatttcccgtacgcctcggtatgaactgcaatttgatgtaatggtatatcacagaaacaactcatcggaatataccactccaaaagagcaacatcctgttgaactaaatttaaatactctatattctccggataatatcttggttgaaatgccatgtgctcaatagcgtattccaaatattcatattgtttcataaaattaaacaacgaatttgcacttaatttaaaaatattactattgtcttcagaatctgaacttactgtaacattgtccaattttttcattgaaatcccccaaaataccttgcttacgcagattatactatttattcaggcatattaaaatagcccacctaaattgcattcacaatctaggtaggctttttaatttacatcatatcaaataacgataattgattttcatcgggtaaatcattcaagacattgttttctgttaaatattcaatcaatgtttttgagactttcccacggttagataagtcttccttagataagaaagatttttcttcgcgggcggagacgatttgcttagcaacgttatcgcctagacttgggacggcgcggaatggtgcgagtaaggtatggtcgtcttggatcaagaaatcagatgaatctgatttttcgatgtcgaccatcttaatcgtgataccgcgttccaaacattcattggcgatttcaagcacggttaacaagttcttttctttcgtgctggcttccatccctttatccgtgatttccttcatgcgcgccttgacgccttcttttccttgggccatcgccacgaggtcgaagtcactggcccgcacactgaagtaagcacagtaataaataattgggaagtacactttgaaataggcaatccggagcgccatcaaaatataggcagtcgcatgggctttcgggaacatatatttaatcttgagacacgaatcaatataccaatccggtacattttcattatcgcgcatggcttgttgccaatcatccggaatccccttgcctttacgaacgcgttccataatgttgaaggacatactatcatccattccccagtgaattaaatccatcatgatattatcacgacaaccgataacgtctttcagggtgacaacgcctttattaatcaattcttcggcattccccaaccacacatcggtcccatgagaaaggccagaaatttggagtagttctgagaaggttgttggatgtgtttcttccaacattccgcgaacaaatcgcgttccgaattctggcacacccaaggtgcccatcttcgaattaatctgttcaggcgtcacgccgagtgaatcagtgccggagaacaaggccatcacacccggatcatcagtggggattgatttaggatcaatcccagagaggtcttgcagcatccgaatcatcgtgggatcatcatgacccaggatatcgagcttcaagatattatcatggatcgaatggaaatcaaaatgggtggtcttccaagccgcatcttgatcatcggccgggaattggattggtgtgaaatcatagatatccatgtaatcaggcacaacgataatcccagctggatgttggccggtcgtccgtttaacaccggttgacccttttgccaaccgatcgacttcagcaccgcggaaagtttgttccgtatcacgttcataggctttaacataaccgtacgccgttttatcagcgaccgttccgattgtcccggcccggaacacgttattttcaccgaacaagaccttcgtataattatgagcgactggttgataatcaccggagaagttcaaatcaatatccggtaccttatccccgtggaagccaaggaaagtttcgaacggaatatcatggccgtccttatcaagtggcgtgccacattcagggcaatctttgtccgctaaatcgtaacccgaaccaacttcccctttggtaaagaattcggagtagtgacagttagaacaccgataatgcggtggtaacgggttaacttcggtgatcccggtcatggttgcgactaaactcgaaccaaccgatccccgggaaccaaccaagtacccatccttgccactcttataaaccaatttttgagaaatcaggtaaataacggagaatccattcccgatgatactcttcaattcttttttcaaacgggcttcgacgatttcaggtaactcagctccgtacaattcgtgcgcacggttcatcgttaaggtttgaatttcgtcttcggcgccggccatcttaggcgtgtaaagtttatctttaaccggtacaatttcgtcgatttgatcggcaatcttttgtggattggctacgactaattcttgcgctaattctggccctaggaagtcaaaggccgtcagcatttcatcagttgagcggaaatgaacatctggtaacttcgaacggttcaaggggttggccccgcccattgagtgaatcagaatcttccgataaatcgcgtcttctggattcaaataatgtgcatcgccagttgcgacaactggtttgttgagtttttcgccaactttaactaagttgcgaatgatttcttcaagtgcctgattgtcgcgcaccaattcacgttccaataatggcgcgtaaaccgctttgggcatcacttcgatataatcgtagtatttagcacgatcgagcgcttcgttataccctttttgcatcattgcttcaaagacttcgccattactgcaggctgaaccgactaaaattccttcgcgcaaagcatcgagtttactcttaggcaagcgcggtgtccggtaatagtattcagtcattgaggctgaaaccaatttgaataaattcttcaaaccagcttgggtttgcgccattaagaccgcgtgtgctggacgggcttgtttgtaaaactcgccgaccccgacgcgatcatttagttgattgacgtttaccatatcgtaattttcagcggcttctttttccaacttatacaataaataaccagttgattcagcatcggcattagcccgatgatggtgttctaggttgatcttgtagcgcttggtcaatgaatccaacttatgattcttgtattcaggatgcaacatccgcgataattccaaggtatcaatgactgggttatcgatcaggtcaatatcgttccgttcataacccgcgttcaagaagcccatatcgaaactaacgttatgaccggctaaaacggcatcgccagtaaattccttgaacattgccaagacttcagcttccttcttggcaccgtggaccatttcgttggtgatactggtcaattgcgttgtgaaggctgatagtggtcgctctggatcgataaattcatcgaacgaggcgacgacttcaccatcgcgcattttgaccgcagccaattcgataattgaatcgtaaacggctgacaaaccagtcgtttccacatcaaaaattacgtattcagctgattctagaacttggtcgcgcaaattataaacgactggcgtgccatcgttgaccaagttgacttcgacgccgtataaaatcttaacgccgtttttcttcccagcggcataagcatccggaaaggcttggagattatagtgatcggtcacggcaatcgcaggttggccccacttagcggcttgtttgacgtaatcgccgattgggttggtcgcgtccatttgagacatgttggtatgcaaatgcatttcgattcgcttaccttcagtcgctgtatcttcacgtttaggatgactaacttcaactaaatcgttggcgttaactgttaaatcacgcatgaagttatcttcttggacactcccgcgaaccttaaaccacatgcctttatcaattgcggcgaataaactttcatcgctagcatctcttgagaacttcttaaccgtaaatgaggatgagtaatcagtcatcttcaagattaacaattggcggccagaacggagtacccggacttctttatcaaagataaaaccttcaatcacgattgaacgttcctcttcagtgatactaatcatctgacgaactggttcagctggattaatcccgcgacccatcacgattgggccatcaactggcttgccttctgttttgcgtttttctttgagcgcttcgtttttcttgattgcttcggcagcggcttgcgcgcgttcagcatcttgcactgcccgctttgcttggaaatcttcgattgatttttgagaagccgattcatcgattaatggttgaatcgcaaagttggggaagcctaggcgtttatagccggcttgaatcgtcgtttgcgcttgattaatgaaaaaggttttaacaatgtcattttcaacaaccaataagactttacggccttcaatatagggcgtctccttagcacataattcatgcaagagtgatgattgaatcccactatgattgacgacatattcccaataagcggctaaaacaccaccatcaagttctttagcatcggtactgatttcaattgaaacggccgcaattgcttgaaaagccgcttctaaatgttcttcaaatgctgtgtaaaccgcaaagggtaacacgttatcgaagtgtaatttaaaggtccaccgttttgacgtttcgtggacaatcacttgttcgacctgccccgttttaaagccgggatagtgcgcgacatccgcaggtaaagcaatctgttctaataatttttgaaacaatgcggtttgatctaatgccacaaaagggcctccttctagtgatacgctgaattaaaaagaggccgaaaagtaacgattgcccataaacgtgcaatcttgctacttttgaccctttttaaaccttactcagtgacaaaaaacgagtctgagacaaaagcaagtttcatcccaggctcgactaatgtcagttcatctttatttttctgaggctaacaaaatgctgagggaattgattaattcatccttcttcacttctaatgtttcgcctgttttacgtaatttaacttcgacgatttcttcggcagctttcttaccaactgtgattcggattggtaacccaatcaaatcgctatcggcaaacttaacgccagcgcgttctttacgatcatcgactaagactgaataaccagcttcttctaacaagccttcgatttgttcagccaattcaacttgtgcatcatctttaacgtttactggaacaacgtgtaagtcgtatggggcaatggcacttggccaaaccaaaccattctcatctgcttgttgttctgtgattgctgataatagacgactaacaccaatcccgtatgaacccatgatgattggtttagcacgcccgttttcgtctaagaatgttgcaccgaattgttcagtgtaacgtgttcctaatttgaagatatggccaatttcgatccctttagtgaattgtaatttaccttcaccgtctggggctgtttcgccttcttgaacaaaacgtaagtcagcatagtctgcgacgttgaaatcgcgcttgctgttgacgttgaggaagtgatgatcagcttcgttagcacctactacggcgttaacaagtgcttcaacactgtaatcagcaacgatttgaacatcttctggtgcattaacgggtccgattgaacccattggagcgttcatcgttgcttgaacttgttcagcagttgctaggtctaagaagtcagcatctaagaagttcttcaacttaacatcgttgacttcatagtcaccgcgtacaagcactaagactggtttttcatcagcaatgaaaagcacactcttaataatcttttgagcgggtacttctaagcgtgctgctacttcttcgatagaatgtgcatcgccagttgccactttttccatttctaattggacatcagttgaactttgaccaggacgaacccccgttgccatttctaagttagcagcgtagtcactttgatcagagtaaacaatcgtatcttccccgatttcagcaatcgcagaaaattccattgaatccttaccacccatggcgccggcatcaccaacgattgcgcggaaatctaaaccgcaacgttcaaaaatgttcgtgtaagcttggcgcatttgttggaaagttgtatccaaatctgcttcattagcagaaaatgaataagcatcttgcatgatgaattcacggccacggagtaaaccataacgaggacgatcttcgtcacgatacttcgtttggatttgatataacgttaatggtaacttcttgtatgatttaatgttattgcgcactaaatcagcaaatgtttcttcatgtgttggtccgaggataaagtctcgtgaatgacgatctttgaatttgaataagttagggccataagttgcataacgacctgattcttcccataattcagctggtaaaataccaggcatttgcatttgtactgcgtcgatcttgctcatttcatccttgataatcgcttggatattttccaatacgcgataagccaaaggtaagtagctataaacaccagctgagacttggtgaatgtaacccgcacgaagcatcattcggtgacttttagcttcagccgaattaggcacttccttgagggttgggataaataattttgattgtttcataaattgttacgcctccaaaaatattctaaaagaaaaatcgttgtatatcgttccacgtgactaagaccattaataacaccataataccgacaccgattaatgtcacgatgccttctttttcaggtgaaattggtttgcgacgaatcgcttcaataatgttcaagactaacttaccaccatctaacgccggaatcggaattagattcataatccccaaattaagtgataagaacgctaagaaataaactaacgcattaaagccttgttgggtaaattgggtcgtcattgaatacatgccgaccggccccgataatttatctagtgagaatccaccggttaaaaatgacccgaggatcttgaaaatctgactggcaattgaccaagcttgtgtaaagccgtaagaaatcttggcctttaggctatgatccattttgactttttgtgtgacccctacttgaccaaccttttctttttggttagccactttgacagccttgggagtcaccttaattgtcttttcagttgcgccccgttgaacgcgcaccgcaacagtttcgttagggtgttctgaaattatcgcactaaagtcagtgaagctcgctacttttttgttatcaaccttcaaaagacgatcgttggcttttaagcctgccttttgagcagctgaattctcttgtaccgtgccaatttgattggattgctgtggcacacccccgcttagaaaagcgaagaggataaaggctagaattgcgaggatgaagttattaaatggtccggcaaagttcgttaacatccgattaatcaacgttgctgattggaattggacatccacgggtgcgatttgcacttccgttccatctgcttcgataatcgtcgcatcatgtaagacgggataacgtttcatttctgactcgtcgccgccttcgtaaccttcgacccacaattccttttgtaaatctgttttagcaatttggaaaggcaccccgtttaacgtggtgaccttgtcacttgtattaatctgttgaacgcgtccttgttcgtccaaaattaaagtcgcttgtgtgcccgcttcaatttcagattcatcgtcggccattcccgccattcgaacgtaaccacctaatggtaaccaccggatggtgtaagttgtgccgtttttgcgagttgcaaataatttaggccccatgccgacagaaaactcacgcaccaaaatgcctgagcgcttagccatgtaaaaatgcccaaattcatgaacgactactaaaataccaaagatgatgataaacgcaataattgcagccaatgtatccgacctcctttttcaataccgtcattcagattctgattttatagggaactgtcttattatatcacgaaatgaaaagaaaaaagagtgcttttgcatgcgccccttttcacagcttgatcgcagaggatcgagttagtgataatgaacggatggaaaaacactctgatttgaatgatagctttaaaaacaggtcattcatgctaaatgatgccaaacaaatgtagtaacggtagtacaaacaacatactatcaaagcgatctaagatgccgccgtgacctggtaggattttacctgaatctttaacgccataatagcgtttgtaagctgattcaaccaagtcccctaattgaccacagattgagaagattaaggttaagcctaacatgattggcaatgagtaaatttgtgggaagaagtataagtaaactgctgcaacggcaacggctaataaagtcccgccaattgagccttcccatgttttattagggctaattgctggccacaatttattcttaccaaatgcacgaccaaacatataagcaccaatatctgtcatccagataaccaataagatgtacatcactgtatcgaaaccgcccaaattacgagcaccggctaagtagtggaagccaagtccaatatacaggctggctaaagttgtgacacccatatcatcgaagtttacacggttcttcgtgaagaccgtgatggctaataagattgcgacgaatagatagaataaatcaaattgtgaaacaccatctggcaaccagtcaaacgctcccgctggtaatgccaaacttaatacggctaaaccggccaccatggcatctgatgaaacgataatccgtttgcgcataataaagacttctgataatgcgactaatgctaatacggctgcggcgatatcaatgaaaatgcccccactaattaaaattggaataaagataatcaacgcaacgaccgctgtaatcactcgttgtttcataaactgaactgcctcctaataaataaacgtctattttaagccgccaaagcgccggtgacgttgttgataagtaaaaattgatttttcaaaaacttgcggtgtaaaatctggccagaattcatcaacgaagactaattcactataagcgatttgccaaagtaaaaagttcgagatgcgttcttccccactggtccggatcaataattcaggatccgcatactcccctaagaagccagtcatcaaatattgactaatcaagtcatcatcaatcgaatcagcctcaattgtaccacttacgacatctttggcaatctgttggacagcctgttgaatttcatcgcgaccaccgtagttcaatgcgaagtttaaaatcatccctgtattttgcgccgtatcagccatcgcatcttgcgctgctttttgcgtttttccaggtaaggcatggatgttacccatgactttcacgcgcacgttttcttcaattaattctggcatgaacgtgccgaagaaatcgacgggcaattgcatcaaaaaattaacttcatcactaggacgcttccaattttctgttgaaaaagcgtataacgtgagaaccttaacacccatccgactagcggctttggtaattgtcttcacattttccatccctgctttatggccagcaactctcggcattagccgtttgttagcccagcgaccgttaccatccataataatggcaatatggttggggatattttccggatcaagttgaatttttgctgtttcttttttatttgtaaacaaaatgactcctccagtttagttactcaacactgattgtaccaaaaattgctgggagtgactatttaaaataatattaaatattttttcaaatcatcatgataagctccaagtatcctattaaatgtgctaaactaactaaataacttttattttcaaaggagtcctctatgaaaaagacattcgaactcttccgcttggattggcggcggattctcaaaagcccaatcgcattcttactaattctcgccctaattatcatcccatccctctacgcatggtttaatatctgggctttgtgggatccttacagtaagacgcaagatttaaaagtcgctgtttattcagcagatcaaagcgtgactgtcgctaaaaagaaagtcgcaattggtgatgaattaatcgaccaattgaaaaagaacgataaacttggttggcagtttacaagcagtaaaaagcaattggacgaaggcgttaaaactggtaaatattatgccggtatttacgttcccaagaacttttctaaggacttaattagctttgtcgacggtaaaattcaaaaaccaacgattatttattcatccaatgacaagattaacgccattgcccctaaaattactagtgcgggcgcgacaacgcttcaatcaaccatttcagaggaacttgtccagacggttgctaaaaccctcatgtcctctctcaataaggctggctttaaactcgatgaaaatttgcccgtcattaaccgtttctcaagtatgattctcaaaacagaccaacagattccggagattaaccaatatacggatcaggtcatcgcactgcaaaagaaaattcctgagatgcaggctaaattaacacaagccaatgacttcgtaaacttcttacccgaagcgaataaaatggctaagaaagtcgtcggcgtcaatcagtacctcccagaagttgaatccgcaggtgccttagctgttaaggtccaagggaagattccagaaattcaaagtgccggtaaacaggtggcaacccttgatagtgattttgacgggattgccaataccttaaccaatggtatttccgaagctaaaactggtttgaccgttcttaataagactcaaaccgtcctcccagaaatcattacctttggtaaatccgcgcagcaagtttctagtcaggttaaaaatgacctgattccaaaactcaaaacgaccttgcctgtcattcaaagtgctgttgatcaaggcttaacgattactgatcaattagcgaaaaatatcgataatgacttaaatgccgttaataaactattagaacaagctaaaaacgatcctgataatcaagaattgaaggctgccttaaagaccaacctcgagcaattatcagcccataccgcaacgttacaagctaacaacacgcaattggcgaataccttgcaaagtttacaagatgcttataatgaatcagcagtcgcagccggcaagcctgaatcacatctcttagatgatccaattcaaaagctcaacgccgctgcaacccatcttggtcaattaaaaactaagattgataacgtgctcgctcattatgatgatctctctttaactgatattcaaaatcaactaacaccaatcatcgcttttgctaaacaagttcaaaataccgtgagccaagttcaaaatgccggtatcggtgcgaatgttaagagcgtccttgctaaattcgaaacgatgattacgcaaggcgatgctgttttaaatcaaatcaacaccgctgtgctaccaaaattaccatcactattaacaaatacgcaaaaaacattaaaaactgctatcgattacctcgaaaaatatcaaaagcaaattccagcgctaaaacaagagatccacgatgccaataccctcttaaatggcaatatgggaaccatcatcagcggtttgaacactgcttctgatctctatcaaaacgattacccaacgttgaaaaataaattgcaactcgcaaccggcttcatcaataacgatttacccggtatcgaaaatgatttaacaaccacgctagcaatggccaacgctaaatttccactccttgaaaaagcattaaatgatgccactgatttaattcataatgactggccattcttgagaagtgggattcaaaaaggcgcagaagcaattcgcaagcaacaaaagacagttgatttgaaagacttgatcaaactacttcgccgtgacgctactaaggaaagtaatttcttagccgaaccagttaagttacaatcaaaacatgtctatccaattaaaacttacggctcagcgagtgcaccgttctataccgccctttgtctttgggttggtgccctcttgctcagtaacatcgtcctcacgaacttctcgttggacgacaagcaaaaagaacgttacagtaagaaacaacaatttatcgcccgttggttgacctacattgtcatcggggtcgcccaagccgtctttgtcgcacttggaaatatcttcctgattaaggcctatatcgttagtccgctagcactcttactactagccgtcttcctcagcatggtctttatgacgattgtttacgtcttagccgcgatgtttggtaacgtcggtaaagggttggcgatgattatcctcgtgctctccatctctggtgggggcgggaacttcccggttgtcttatccgataagttcttccaattcattaacccgttattaccatttacttacggcgttaacttactgcgggaaccaaccggcggcatctacgcgccaaatctctggcataacttcattattctagcgatttacgcagttgtcttcttcttcatcggcctcttcttaaaagatcggattaatcctttcttcgaaaaactccataaagaagcagccaaaagtaaaattattcattaatcaaaaaaaggcgttgagacaaaatttgtctcaacgcctttttaatgaccgtcagattaaccttcagtaatttctttttctttatctttagaaatgacatcgattttctttgttgcttcgttcgttaagttttggacttgttcttccaagtcatgcatttcatcttcactaatttcgctagctttttcagcctttttcaagttatccattgcgtcacgacgagcattacggacaacaactttagctaattcagcttccttaccaacttctttagcgatttccttacgacgttcacccgttaattgagggattactaaacggattactgaaccatcgttagctggtgaaataccgatatcagctgtgtaaagagctttttcgatatcttcaagtgcacctttatcataaggtgtgattaacaatacccgtgcttcagggattgtgattgcagcaatttggttaagaggtgtcattgcgccataatattcgacgttgacacggttaaccaagcttgcattagcgcgaccggcccggatttgaccaagtgttcggcgcaatgaagcttctgctttttccatgttttctttagcttgttctaaaattggatttgccatttttattcctctccttcaatcgttgtaccaatattggcaccttcaacaacctttttaatgttgtctgcttcgttcaagttgaagactaccaatggaatatcattatccattgataaagtacttgcagttgaatccatcacttgtagacctttgttgataatatctaagtgtgttaaagtatcgaacttaacagcactagggtctgtgttaggatctgcagagtaaacaccatcaacgttgtttttagccatcaagataacgtcagcatcgatttcagcagcacgtaatgcagctgttgtatctgttgagaagtaagggttccctgtcccaccagcaaaaataaccacgcggcctttttctaaatgacggacagccttccgacggatgtaaggttcagcgatttgacgcatttcaattgatgtttgaacacgcgttgggacaccaatactttccaaattgtcttgtaatgccaaagcattcatgacagtagccatcatacccatgtaatcagcttgtgcacgttccatgcccatttgttcgccagtcacgccgcgccagatgttaccaccaccacagacgattgcgatttgaacacctaaatcgtgaactgatttaatttcattggcgactaccttaacgatttcaggattgatcccgaagccttgttcgccggctaatgcctcgccacttacttttaagacaattcgcttatattttgtatttgtcatatttaatatccctccgttgattactaggcccattttaccatatttaactaggcatttgggtatgcgattctgaattatcgcaaaactgcaaaaaaaaggagcgcaaattgcgttccctttttgaagcaaatatgcttatttgatttgacccataacttcatcaacgaagttattttcttttttctcgataccttcaccaacagtgaaacgaacgaagcctttaacactaccattttttgatgcaacaaattgtgcaacagtttggtctgagtctttgatgaatgcttggtcgtttaagctgatttctgacaagaacttgttaacacggccttcaacgatcttaggaatgatgttttctggcttgccttcgttctttgtttcttcagttaatacttcacgttcgtgatccaatgtttctgcaggaacatcttcgcgagaaacgtattgagggttaacagctgaaacgtgcatagcaacgtcatgagctgcttcatcgtcagcaccttctaaagtaactaatgaagcgatttggccaccattgtgtaagtatgaaccgaagtgatcgccatcatttttttcaactaattcgaaacgacggaagctgatcttttcgccgataacagctgttaagttgattactgagctagcaattgtgccttcacccattggtaattcttcagcagcagccatgtcagctggtttgtttttagcaattgtttcagcaatatctttcaataaagctttgaattgatcgtttgaagcaacaaagtcagtttctgagttcacttcaacgattgcagcagtattgccatcaatagcaacgccagctaaaccttcagcagcgatccgatcatttttcttagcagcctttgccatccctttttcacgtaaagcatcgattgcttcttcaacgttaccatcactagcaactagggcttttttagcgtccatgataccaacgccagttttcttacgtaattccattacttgagcagctttaatttcagccataattcgtacctccgacaatttatattaaatatgattggtttaaaaaaagctgtcccacaagtcaggcagtatttgcgaaacctctaagacagcttatttgaatctactatttagcgtcagtgttagtatcgttgttgccttcaactgcttcaacgatttcttccattgagtctgctgatttgttttctgcagcaaatgtagcttcttcaacatcatcttcaccttgacggccttcgatgatagcatcagccattttagctgtgattaaacgaacagcgcggatagcgtcatcgtttgatgggataataacatcaatatcatctggatctgagttagtatcaaccatagcaacgactgggatatttaatttttgtgcttccttgatagcaatccgttctttacgaggatcaacgacaaacattacatctgggatgcgtggcatgtcttcgataccgcctaagaatttttcaagtttttcttgttgtttcttcaacaaggcaacttctttcttaggtaaacgttcgaaagtaccatcttcgtccattgctttgatttccttaagacgtttgatacgtttttggattgtatcccagttagttaatgtaccacctaaccaacggtgatttacaaagtattggcctgcacgtactgattcttcagcaattgcatcttgtgcttgtttcttagtaccaacgaataagaatacaccttcgttagcagcttcttctttaacgaagtcataagcatcgtcaaccatgcgaactgtcttttgcaagtcgatgatgtagataccatttctttcagtaaagataaatttcttcatttttgggttccaacgacgtgtttggtgaccgaagtgaacacccgcttctaataattgtttcattgacaatacagccatgtcaacagacctccatatggttttattcgaccactggtttcacttttttagagaacttgtcgccaagcacctctctagaaatcaaccagtgtgaattattttttggtaatgaaataccgtttaaaagtatactaaagatattcgctagagtcaacctgtaatcccgtttaaaattgggtactttcaatcccgtgtgcgattaagtactgttccttttttaaacggctttggtgtttaaaggcgtattcggcttttaaagcggatgacttgtccgcaaatgtttcgtaatacaacaaacgcactgggcgccgaagcttcgtgtacttcgcacctttaccagcattatgtgtggcaacgcgtttcctgacgtccgtcgtaaagccaccataaaaactacgatcggcacagactagtacgtaaaaataataagctttctcagtcatcttctgccatgaataacttcgtgcgcatttctggtgtatagtcactattttcatcatagatcgtgagttccggaagcattcgcaagcccccttttttaccatctttgacggcttcaatcaataccatgctggcttctttacctgccttagggtaaacaaaccggacgcgcttgggttccatgcgtgctgcccgtaattcatcacagatttctaagaatcgttctgggcggtgcacgagataccctttaccattcatcttcaacaaaccactcattgtttggaccacggttcttaaatccgtcgcaatttcgtgacgcgctaaggctaggtgttcattaggattcttttgactatttggcgccaccttaaagtacggcggattacaggtcacaatatcgacgctatcttttttaataacgatcgttacgtcttttaaatccatatttaaaacgctcaactgttctgtcaacgcgtttagttcgattgaacgttgtgccatatctgccaaacgtggttgtaattcgacccctacgatttggccatttgttttggggctcataaataagccgaccgcgccattaccagcgcacaaatcaacaatcagacctcgcttgggcaattgcgcaaaatcagctaacaagactgcatccattgaataagaaaagacggatggactttggataatttgaatatctaatcggaataactgatcaattctttcatctgcttttaacatgctactttcaaccccacttgtatttagcccatattataacaaagaccagcgttatttggtataatagctaggtagttcgttaaatcgccttaaaaaaggttttttgaaaggaattaaaattatgtttttctcatttgcccgcttcatcgtgcgaattcttgcctggttacttaatggccgaatcaacgttgaaaacaaatcagctttaccagagggcacctacgttttagttggcccccatcggacttggtgggatcccatcttcttcgcacttgctgcaagccctcgtaagtttacgtttatggctaaagaagaattattcaaaaatccaatcttacgttttatcttgaaacacgccaacgcgtttcctgttaatcgtcaaaatcccggcccctcagcgattaaaacaccggttaaagccctacgttcaaaggacttatctttaatcatgtttcccactggtagccgctattcaagcgaattaaaaggtggcgcagtggtcattgctaagatggcgcgggttccattagtccccgccgtttatcaaggccccttgaaattttcagccgtcttaaaacgtaaaaagattacgattcgtttcggcgaaccaattccagtcgaccctaaacttaaattaaacgacgaaaacttgacaatgattggtgatcaaatgcaagccgcttttgatcaaatcgatcacgacatcaatcctgattttaaatatgagattgacgatcacaaataacacaaaaaaagacgcgcgccaacgatgaaacttatcgttgacgtgcgtctttttagtactctatttttcccaatactgatccaagaattttgcaaccttattgcgataagctgttggttgcttggctaacgcttcaccatggcctgcatctggcacaacccacaattgcttaggcgcattagcggctttgtaattttcgtaaaccatcttcgtcggtacaaatttatctttagcgccatgaatcaacatgattggtaattttgacttagcgagactcttggttgcgtctccttcgctaaagttatacccagcacggacccgcgccatcaagttagtggtataaaatagtgggaacttcggtaaaccaaacaaatcgttgagttgataggccaactcacctgagatactgctgtacccacagtcttcaatcactgctttaacctgcttaggcagcttttcgccagcggtgtagatcacagtggcgccacccatgctgaccccaaagagtgcaatttggctatcttgaccatttttggcaatcacttgtttgatccatttaacgtaatctaagcgatctggccaaccatagccaatataatcgccttctgattcgccggaaccacggtcatcaggtgccaacacgttataccccaagtcatgatagagatgaatataacgcgccatatcttccttatagcccatataaccgtgtgcaacaacgatcgttttagttgtttttttagcagctggtacgtaaatcgcgtctagcttaagatcatcagtcgctgacttttgataccacttcactttatcggcttttgccaaccatttctgattgtcgcgataaaacttgctaggcttgccattattcaagaatgacttttgccctggtacgaaagcatattgatacatatacagcgttgcgccaaagacaccaatcacaattaaaataacaacgcttattaaagaccatttaagccagcgtttctttttcatcttctaaaaatcctcctggttattccaaaatgtactaaacgtgtgctataagtcatatccttgcggttaacgccgaatgtcaaacgatggcttacagccatcattcgccactctctgttaatcctcaggatataaccgacttatagcccactctgtccattttgtaattgatacatttcataatagcggcccttttgtgcaaccaagctatcgtgattgccccattcgacaatttgaccttgatccaagacgagaattaattctgcgtcacgaattgttgataaccgatgggcaatcgcaatactagtccgtccctgtcgcaagcgagcgagaccggtttgaattactgattccgtttcggtatcaatgttggcagtcgcttcatccaagaccagaatcttcggattggtcactaatgttctagcaaatgagagtaattgtcgttgtccacttgaaaattgtgcgccaccttcaatcactcgtgcgtggtattgacctggtaattccttaataaattcatctgcttgaacaaattcagcagcggcttgaatctgttcatctgtaatttcatcattaaacaagcgaatattagaagcaatatccccataaaacatgaatgcatcttgtaaaactaaccccattttacgccgtaactctgccgtttgaaaactgcgaatatcttgaccgtcaattaaaatttcaccttcataaaattcataaaagcgcatcatgacgttgataatcgaacttttaccagaaccggtatgccccacaagtgcaaccgtttggcctggttcaacgacaaacgaaatatcatggagaatttcatgcttaccatcatatgagaacgacacgtgtttgaactcaacgcggccatcggtaatttgactagcagcatctgcatcttgggctggtgcaaattccgtttgatccagaattctaaaaatacgacggccagcaaccatcccatcttgtaatgaggataatgaatccatcatattggtcatcggattgaaaaagttgctaacgtacgtcgtaaaggcataaaccaacccagccgcaacaaaactatgcaacgctgtaaggccaaataaactcaaaacaaccactaacgccaacgtatacaacaagttaacgaccggtgccaataataaggaattagtccgaatcattgcttctcttgttttcagataatcttcgttaaccgattcgaattcagctgtgagtcgtttttcttggcggaactgttgaataatcgtaattccttcaatcgattcgttcaacttagtgttcaattgactcaacttttcacgcatatgtcgataaaccttggcactataactgctgtaataccaaataatgactaataaaattggtaaaaaaccagccgttgctaatgcaatcttcggtgataataaccacatcgcaatgaacgcggagataattgaaaatgaacccactaataatgataggaacacattccaataatcaattaacgtcatcgtatcattggtaactcgcgaaacaattgatccagcaggtgtttgatcaaaataacgcatgcccaaacaatgtaactgtcggaaaagatcacgacgtacatcttccatcgcgcgttctgatcccattccaaagaggaaagattgggcaaactgcgtgatagctttcaaaataacccctaaggcatataacccagcaacccctagcaaaatttgagttgtcgctgtttgtttcgttaagtaacgatccataaaaacttgtaataagcgcggcaacaaaatgttaatcgttgctaagcccgctgctgcgatgattgcgccgataaattgtttcttatagcgcttggtataaccaaaaagtcgtttcataatttgaaactgttctttcgtcgatatcttttgtgaccattcagattgatacttttgtgccatcctattagccccccatcgcttgatttaattgttgtttaacccacatttcagcataccacccttgttgggctaataagctgtcgtgcgtgccacgttcggcaatcgttccgtcatccataacaataatctcatcagcgtgcattacactactgagtcgattagcggtaataattgtcgtttgatttgcccgcaacgtcttaagattcattaaaattgcttcttcagtcttcgcatcgaccgcggacaatgaatcatctaaaattaaaatttcaggatcagtcattattgcccgggaaatagcaattcgctgtttctgtccacctgataatgacacgccacgttcaccaacaactgtgtcgtaaccttgcgcaaacgtaagaatgtcttcatggaccgcgccagagcttgccgctgcttcaacggcctcttgttccttttcaaaatccgcaaaccgaatattatcgcgaacatctgttgagaataagaagttgtcctgtggtacatagccaatactatcgagtaatgcatctaatgtgtaatcccgaatatcgtgctggttaatcttaatttggccctgatattgatcatattcccgtaacagcaacttgatcaaagtacttttaccagaaccaaccttcccgacaattcccagtgtctttccttgtggcagttggaaatgcacattcgttaaagttggtgtttgttcttcaggataggcaaattgttgaatggcatagtcgatatcaccagttgccaaagtttgaatggcatctggcttttcaataatcgtgctggtttcttttaataatgattcaacccgatcataactggcattgccacgttcaagaacattgaataaacgaccaatcgcaaacattggccaaactaaggctgcgatataactgataaaagcaatcaattggccaattgtaatactgtggttcatgaccaacgttccaccataaataattgtaacgaggtacgttagcccgataattaaactaatcgctggatcaaataaaccatcgatgaagttaacacgcttgttaatcgcaattgtcttcgtcacaatttggtcgaaatcgttgatatcggcttcttcttgaccaaacgtttttaaaactttgatcccagaaacactctcttgcgtcttatcatttaatttcgaaaaggctgcttgtgattctctaaaagccgtatgcaaatgcgtccctaagcgtcctgaagccactgctaataatggcatcggaatcaacgccattaatgtgagccgccaatcgacaaaaataatcatcgcgacgatcgttgtcccacccgtaataatcgaatccgcaaatgttaaaataccggcacccgccacttgctgaatcgcagttaaatcattagtggcatgggccatcaaatcgccagtccggtgtttctggaagaaagttgtatccatcttcataaaatgccagaacaaacgactccgcaatgtccgttctaacttggctgcgccaccccagatacgagtccgccaaccatagcgaaagagatattgtaaaatcgcggctgctaataagaccccaatccacattaataagaccgatgccttcaactttcgggcagccattaaatcaattaacgtcccaatcacttttggtggcacgatttgcacaattgcaactaggactaaaaaaacaacccctaatatatagcggcgatattcttgtttaaaataccagcctaatttcttaaatatacccataaaatatctccgtcttcaaaattagataatcctcattatagcaatcttagttcagtgggacaattatttctcttccaataaaaagagggttccatacaaaaataagtttttgtacgaaacgcctctttaattaagtcatgtttattttttgctacgtttttgttgtgctttcattgagctcatcatctggtttaatttcttttcagatggtttttgccccatttgcatcatcatagctttcaacatatcttcattaactggtggattttcttcgaaatatttcttcatgtaagcacgtgcgccgaaaaagccagcaactgcacctaataatgccccaatgacaaaaattaatacgcctattccaatattcatatcttatgcaccccttcctcattcagttcacttaaatattctacacattattgcactaaaaagaaagcggaattcctagattaatcgtcacgtaaacccttttcacgttggatgtccttcactttttcaggtgtgacttccttaccttctttatcataaacttgtagcatctcaacttgtgaacggaaactagaacggaaatccttcaaataagcgtcccgtagttcttgacgttccattgtttcttcgggtgttaacccttctgcttttgctttatgtgctaattcgttgatacgatcgagtcgtttttgatccattgccatcatcggcctccaactttaaacttttatcctattttggactaaaatgctcaaaatgtcaaaaaatacgaacacttgtttgaaattcacctataaatatgctactatatgcttaatagaacgaatgaggtgcgcttatgactaaaactgaatccaaacaattagaggtcttacgttttattcacgaacgtgttcaagacaaaggttacccaccaacggtccgcgagatttgcgaagccgttaatttatcgtccacttctactgtccatggccatttagcccgacttgagaagaagggcttattacaaaaggatcccactaagccacgggcgatcgagttaacgcccgctggcctaacggcaattggggcgacaccccagaaaataccagtattaggggtggttactgccggtgtgcctatcttagcagttgaagaagcaactgattacttcccgcttccacctagtttgcaaaccgaacaagatttgttcatgctaacaattcgtggtgaaagtatgattaatgccggtatcttagatggcgacgaagttatcattcgcaagcaatcaaccgccgataatggcgatattgtcattgcgatgactgccgaagatgaagcaacctgcaaacggttcttcaaagaagcagatcactatcgtctccaaccagaaaacgatacgtttgaaccaatcattttaaatgaagtcagcattctagggaaggtcgttggcctttaccgagatcgcatgtaataaaaaagaagttcgcttaggcgaacttctttttttgtctgtttctctttaacgtgctttcatcaactactttctgcactttgctatatcagtcaaatgttcaaaagcaacctgttgatggcgcacttctttattagtattccattaatttgaaaatatcatagtccttaatcttttcacggccgtttaagtccttcaattcgatgaagaaagctgtcccaacgacgatgccgcctagttcttcaaccattttgattgttgcggcaattgtcccaccggttgctaataagtcatctgttactaagactttttggcctggtttaaccgcatctttatgcatatataatgttgatttaccatattctaaaccatagctagctgaaactgtttcgcgtggcaacttgcccttcttacgagcaggtgcaaaaccgacacctaatttgtaagcaaccgggcagccaacgataaagccccgggcttcagggccgacgatcatttcaacgcctttgttcttagcgtattcaacaattttatccgttgctgctgcgtatgcttcaccatcggacatcaaaggtgagatatcacgaaaagtaacgccagcttccgggaaatccggaacacttgcgacataatctttaaagttgattgacatatataattcgctccttaactcttttagcgatttgctactgctgggagagttgctagccagtctttcacctcggtaaaggttgaataaacaagctgtttttccatttcaattttagctaatcgtttttgataacttggtgcactttccagtgcatgcttttcaggttgtaactcggccgtaatcagaccacgttctattctaacaaatccgaggtcaaaaaacacctgcaacatgaaaatcattaacggtaattgtaattttaaatacgctgctaattcagctaaccgcgctttttcaatgttcggatgcttccgtaagtaaactaagaaggtcgcaaactgttgttttgtcggcattccttctaagtaagcagagtgtttggcataaaaaattaagcttaatttagcagcctgttgttgttgataaaattgttcaaaagcagttaaatcagctggttcatcgaccacaatcaactcttggcttgtggcaacttgttcatcggtcgctaacagcgcctgactccctgccggtaaataagactgcagttgctcgcgcattttatcattaaaaaagacgtagtcgcctgttgattggaataattgttttgtcaggcgattgctgcgttgatcaagtacgacttgcccacttgtagcaaggtcttttaccattaattgcaacgtcgtctggccacgccaagtattctcactcaaactcccgactaatttcacatcttcagcggcagttaaatcgggcatcaaagcccctttattgaaagctaaaaccgctaattgttgttgttgatcgaccgccatcatcttcaaatgtttctgatcagcaccgatttgtttgacatcggccaactggggcgcgctaagttcgattaacggttctggattatcactgccaaacggtgccagttgttgcaatgcttgatataaatcaggtgtaatatcagccaacgtcagcgccaaatcaactggtaatggttggcgtcccgttaaatctaactgattaacttgcgcatactcgttcattgcagtttgaatcagcgctaattgatcaaccttagcagtcaagccaactgccatgtgatggccaccaaaatgaaccaataattcacggtgggcatctaacgctttaaataaatggaaagctgtcacactacggccagagcctttagctaaaccagtttccgggtcaatcgtcaagactaaggttggtttaccggtctgttcaacaacatgactagccacaatccctagaaccccttcatgccaaccttcgtgggcaataactaaggtggcactcgcttggttttccggtgtttcagcaattgtcattgccgttgccgtaatttcttgcactagaccttggcgttttttattttgttgttcaataaattgggcctgctcgactgcttcttcgtcatcaagcgtcgtcaatagttgcacaccaagagttgcatcacctaaacgaccaattgcgtttaaacggggaccaatcccaaagccaatgttagtggcatctagtgtcgcttgttctaagccagctgattgacacaatgcgaccaaacctggtcgatcggtattttgtaattgttgtaagcctaaactaaccaatgtccggttttcatcaactagggggacgatatcacaaaccgtcccgattgcggctaaatctaatttatcgtaaggaatctcttctaataaagcagtcgccactttaaacgccacaccgaccccacagagttcgccaaaaggatattgcccttctggatgtctgggatgcacaatcgccactgcgttgggtaattctgatggtaattcatggtgatcggtcacgaccacgtcaacaccgtgttcttgcgcataagcgattggttctaagccactcaccccgttatcgacggtcacaattaattgggtgccattttcaatcaagcgtttataagcttctaaattaggcccgtagccatccttaaaacgattaggcacatagacttcaacatcggcacctaagtcgtctaaagtttccttcatcaaagtggtacttgtgatcccgtccgcgtcataatcgccataaatcgtaattttttcgccgttcacaatcgcttcttgaattcgatcaatcgccttttgcatatcatgcaaagcgtatggatcgtgaagttgaccgacattgggattcataaaatcattgatctgctctgcatcccgcaagccacgttgccacaaaagttgggccgcagccttgggtagcggattgtcttttgtaattgtttgtaattcatcttcagttggtactggttttaattgccattcatattgtgcttccaaattaatccctcactacttcccagtcattaactaaaccattatagcaaaatttagcacttttcgcccaacttcgccttttgtttaatccgatagatgctatactattaagagtacacctgtattctcaacttagggggaaattccatgtcaattctagttttagggggcgccggctacatcggttcccacaccgttgatcaattaatccaacgcggctatgacgtcgctgttgtcgatagcttggtaacgggtcatcaaggcgccatcaatcaaaaagcccgtttttatcaaggtgatatccgcgataaagacttcatgcggaacgttttccaacaagaagacgtgactggtgtcattcattttgccgccttttcaatcgtgcctgaatcaatgcaagcaccacttaaatacttcgataacaatacttatgggatgaccgccttattagaagtcatgaatgaattcgatgttaaacgcatcgtcttttcttcaactgccgctacttatggcgaacctaaatcaattcctatcaaggaatctgatccacaattaccaaccaacccttacggcgaaagtaaattaatgatggaaaccatgatgaaatgggctgacaaagcttacggcatcaagtttgttgcattacgttacttcaacgtagttggcgctaagccagacggttcaatcggtgaagatcaccatcctgaaacccatctcttaccaatcgtcttacaagttgcggctggcaaacgtgatcaattatcaatcttcggtgatgattacgatacaccagatgggacgaacgtccgcgattacgtacacgttttagatttagcagacgcccacatcttggcctttgaatatcttgctgatggtcatgacagcaacgcctttaacttgggttcatcaactggtttttcaaacatggaaatcgttgaagctgctcgtaaagtaactggcaaagcgattccacttgaaatggcccctcgtcgtgccggcgatccaagtaccttgattgctgctagtgacaaagctcgcgaaacactcggctgggcacccaaatatgataatatggaagcaattattgaaaccgcatggaattggcatttaaaccatcctaacggttacgctgatcgctaaactaaattaaagctgttcaaaccctaatgacggatttgaactgctttatttgttataataaaaatggaacttaaggaggttcatcatgtctttattcatcacaattttaacgagtttaatcgccatcgaacatctcggcattatgggactcgaaatgttcgctaacgatcaaacaaaagccaaggccttcgatatgccacttgattttgttcggctgcccaacaccaaagtcgcccttgctaatcagggaatttacaatgggatgcttggtgtcttaatcatcgccgtcaattgcttattgaccggtgccgcattaaaaaccgtcttagcattgttaatgttatacatcttcatcgttgccctttatggcacttttaccgcaacgaaaaagattttcttcttacaaggcttaccagcgctgatcacattgttactaattttaatcttttaaaaaaggagttttcataatgactaatcaaattttaattaccacgaccgaaagtattcctggcaagcactacgaagtgctcggtgaagttttcggtctcacaacccaatctaagaatgttttcaaaaatatcggtgcctcacttaaaaacgtggttggtggcgaaattagagcctataccgaaatgatgaccgaatcgcgcgatgtcgcaatcgaccgtttacgccaaaacgctattgagatgggggctgatgctgttgtgatgatgcgctttgactctggttcaattggaacggacatgcaatcagtcgctgcctacgggacagccgttaaatatatcgactaattaaaaagcctcgtaattgatttaacaaccaattacgagactttttttagttatgctgctggtacttcaggctgcgtattatttaatgtccaagtgatatcactagagaaattttcaccaggttcaatttgaagatccggattggcagccatcaataagttacccgttacttgccaagcgtttgataacttggtcgatgcaatcgttgtttcactattattatcaaccaatcctaaattagctcctcctggtaggccactcatattaaccgtcgttgtattcaatcgatgaccagctttagatgccattttagtcatctttgccgttagtttccaacccggattaactctagtatcggtaatttttaacgtgtcactaacttcatatggctgattctgagtgtttgttcccttataaacatctttcgctaaaacattgccaaatctaaagttaggcacttgatccaatgttaacttacctaatgagggctcaacttgtagttcggccttattagagacaacgacgaccttttctgctttcttacttgattcttcttcagaatcaacactcgtcgttagtgttagctgtgcttgataactctcaccactagcagtcgcagctgcggcctgtttcataaatagactatccttagcaaacgttaacggttgtgccgtatttaagtcagccagattattaatatcaccgctactatttgtcacgccactatttgctggcaactcaatcgttttaccagtactatccataaaacgccatgcataatgccaagcactcgttgcgccggttgctttaactaaatcactcaagccgcccacagaccaactaccaccggcatccattgcccgattataggctggcagaccaccaacataaacatccttattagccgctacattaccagctgcaatcttaaagttagcgggaattcccggtacattaggatcacgattgacttgattgacgtaataagaatctggtacatattgtttgtcgctacccacttcaccattaccggccattaaagatgtttttcgaccattacttggtgtaaatttcaagagatctttagcgctggctgcttgccaagtaatatcatcggtcgaatcgactggatcaataatcgctctagcaccataatcaacatccgaatagatgactttaggtgtaccgtcagcattatccgtatcggcattaatcgatttagccggtttcggttctggcgtaatccccactttcgctaaatcagaatagaaagtcttattaagaggccagataccatctgaaaaactaaattgataatagtatgtcccgacacctaagttgcccgacttatttaaagcatagtcattaatatctaaaaagcccaaagagcccatgatcaaagacaaaccggtctttgctttaggttgctttttatcttcaacccagttgttctgactagcatcccagtgccaacgccgaacagtaatgtcttttcctaacccattacctaagttcgttaggatactcatccctgagaatttagccttatcaatatcttgtagcgcaaaataatcttcttcttgcggctgacggctaaaccctcttctaaaaattgttaataaaaagctccatccatcttttgaaggtttatctgcattactaggtgtaccaactggttcagcactgcgactagttggtgcttgctcactcgtagctggcttttttgtattgacatcgattgattctgttggtgtttctttttcggtttcactcacactggttgctgactctgattcagccgcccaagcgtgatccggcacattaatcaaactaccgctgagcatcattgccgccaaactcacgtaaattaggcgcttaatttgcatcgtagtccgcctccttcgtattagattgttggcgatgccagccaagtaccaatagaatcatcgcactaccaattaaacttaatagtgtactttttatagcacccgtttgtggtaaacgaccagtggcattttgggaaccactcgctgtgtaatgaatttcttgaccattttccggtattgttggctgtgcaacaccaccatcctgaccatgattcccgggtggcgttggtcttttttgatcaatatgcaccgcaaaactagcggtactttgtccactatcaatccgattagctcgtactggttgcgctaccgttaccaataagagtatcagtaacaacaatcccatcattaagccttctttacgtcctgataaactactcgtcatgttcccctacacccctttttcgaccaattaaataggcgactaatgctatcactaataataataaaatccctagagaaccccataaccaccaatttatccctggtttttctggatcaattagcgttttgttaacttgttcccgtgtcgcaccatcaaccgtaaaatgttgttttaaattaaaggttttcttacccgatactattttgacatgataggtatagtgacctttgggcaaaattttattattcgtctcaattgcatagttaaatgttgagcgcggtgccattgataatttttccgcgttcttctgatatatttttttagtttgattctttttggtaatccaagcatgcatcttaatttgaccaaacattgtcggttcatgattagcgatttgaccaacaacttgcggcaccccactggatgaatccaccttagtcttcgttaaggttaatcgaggtgtgatttcctgatcaaaatcccgtgtcacaacgattggaacagtcatcgcaaaactatttttaatgccgaaccccttcttttgtggttcgttattcgacgttcgtttcacataaacactaccaagaatcgttcctttaaaaccattttggggtattttaacgttaaaagtcactttttttgaagcacctggcgctaatgttaaactttgtttgcgggcctcttttgagaccaaatcaggtaacaatggcgcttttgttttgaccattttttgatgcgtcggtgtatagtcaatactgccgctatttgacgttgaggcggctacaagctgtgcattgaaatcatttgttttcttcgtatttaaattttgcacgttgacggtaattggatatgtttgtcccttttcggctttaattgcgaaataacccaaactagcatccgtttgtcctaacccatattcaggtgttacagtaaattcagcaccttcagcatacaccgcttgcgcaaaactaccaatccccaccaataaacacattaaacctaacattgtgattaatactttctttttaaacaacttcgtagcctcctataaaaataaggggtggacaaatcactttgcctgccccttatccaacacatcattcacttgattgacgatgacgatcactagcgccaatgactcattatttctagattaagcttctggtgcaactggggctgttgatgataagttccagttaattgttgttgagaaagcttcatcttttgctaaatcagcagctgggttagctgccattgtcaatttactatcggcagctgccatgttgaatgtatcaacaccatgggcaccattacctttgacaacttcaacagcacttgcatcatctttaatagcagttgctaaatcttcacctaatgaaccagtagaagctaagttcaacgttgaaccatttaattggttatctttatcggcaaattgacccatatcagctgttaatgtccagtctgatgcacctaaacgtgtatcagatacttctaaagtaccgtctgcttgtgcttttttaccattaaacccagcataaatatcactagcttcaattgtaccgaagttaaaacttggtactgattttaaaaccaaagtaccgttttcaggatctgttgggttagttggatctttagcaacaaccgtaaagtctgcttttgatgtttgtggtgttaccgcatcagctgatgctgaaccgattgtcattgcggctggtgccaccaatgctgctactgctactactgagaataatttagtcttcataagataattccttcaaatattaataattaattacattcaatatagcagcacgtaatctatcttctaaatgacaaaaaagggataccaaatggtatcccttttttgttgatttatctttttttgaaactcatctataattttgcagtttatttggcaatcaccaatcttcttgtatacaccgcttgacctgaatgcatcacagcatcatcaataaccgaaactaaccgcgcaccgcgtgtcactgccggcgtccaattatcatcaatcacttcatctagactttccagagaaacatcttggagataagtttgtgttaacttaacagcttctgacaagtaatcgattagaagttggcgatcagagacgactaccttggccgcctcttcggggctatgctgccaatcttgcgtatcatctggtaacgctaacccaaaacggcctgtccaattagcactgagccacaatggtgtttgcccttttaaatctgaaatctgatagtctaattcccgtgccgtatgccaaatgagccatgttactgatttgataagcggattaggcatcgtattagcctcctccagtgtcatctgttctaaagcttctaacagacgttcttgggcgcgagccaccgtttcaatcgataattgcattgcttccatcatagtttcctccaaattcactaagttgtggtcattatagcatgcctgctccagcaataccggcatcaaccatcgtcgcctattctcgcagcaccacttttttgatatactactttgtaatgtcaacacatcaaaggagtatccgcatgtcatcagcacaacaaattatcctattatttatcgtcttctgttcagcagttgccgttcttggctcatccctaatgagtttcatcgccttttataaacataacgcgaccctcagaaaaagcgccagcgtcactttctggatcagcatcattatcctcgttatctttctaaaactaatcgatatgtatcaataacaaaaagacctccgatcattatcggaggtcttttgttatttatttacctttggtatcttcatcattcatcttaagaatcgacatgaaggcttcctgcggcacttccactgagcccacggatttcatccgtttcttcccagccttttgcttttctaacaatttccgtttccgggtgatgtcgccaccgtaacacttagcaagcacgtttttccggaaagctttaacggttgatcgagcaatgatcttattcccgatagcggcttggattggcacttcgaattgttgccgcggaatcgtttctttcaacttaccaacaatcacacggctccgttcaaaggcaaagtcccgatgcacaatgaaactcaaggcatcaaccgcttcgccgttcaagaggatatcaatcttaaccaggtcgctggcacgatagcccgtcacttcgtaatcaaacgatgcgtaacccttcgtatttgatttcaagtcatcgaagaaatcaaaaataatttcagaaagtggcatattgtagatcacattaacccggtacgtatctaaataatccatcgtcacgaattcgccccgtttacgttgggctaattccatcacagccccaacataatcgttagggaccatgattgacgctttgacgtatggttctttaacttctgaaatattcgatgtttctggcatttctgatgggttatcaatcacttcttcagtcccatcagtcaaggcaacatggtaatcaaccgatggtgccgtcatgatcaagtctaaattaaattcacgttccaatcgttcttgaacaacatccatgtgtaacagacctaagaaaccacaccggaacccaaagcctaaagcttgcgatgattctggttcgaactctaaagctgcatcgtttaattgtagtttttcaagcgcttcacgtaaatcattaaacttcgcattatcaacgggatacatccctgaataaaccattggttggatatgacgataaccatcaagtggtgcctcagctggattatcagctaaagtgactgtatccccaacgcgtgtatcttgaattgttttgatgctagctgtgatataaccaacatcaccgaccattaagaaatcacgtttaaccgctttgggtgacatcacaccaacttctgtgacttcaaattctttaccgctgttcattaaacgaatcttgtcgccgactttaaccgttccatcgaccactcgaatatttaaaacaacccctcggtaactatcgtaatttgaatcaaaaattaaggctttaagtggcgcttctaaatcaccagttggggctggtacatccgtcactagtttttcaagaatttcttcaatcccaatcccacttttggcactagcaagaacggcttctgacgcatctaacccaatcatttcttcaatttcagccttaacaacatcaggttgcgctgatgggaggtcaattttattaataaccggtacgatttcaagatcatcgtcgactgctaaataaacgttggccaatgtttgggcttcaacgccttgcgctgcatcaacaactaataaggccccttcgcaggccgccaaacttcgtgacacttcatatgaaaaatcgacatgccctggcgtatcgattaaatggaaaatataagtttcgccatctttagcatggtagtgcaattccaccgcgttcaacttgatggtaatcccacgttcacgttctaattccatgtcatctaagacttgcgcttgcatatcgcgcttggcaatagtatccgtcatctcaagaattcgatcagctaatgttgatttaccatgatcaatatgcgcgatgatcgaaaagttacgaatgtgtttttgccggtctaacatttctgcgtaatccatttattgtacctacttcctctgactatcccttaaattataccaagcatgacacttaaaagcgaacagtattccttaaaatgacgccactaaaaaagacgaccacttaaaattaatttagtgagcgtctttagcaactatttttctggattcgttttagctttttgtttatctttttttgcttcttcttgcgatttatcgtgggtcacttcttcgacgaccttcttaactgtgccttcaatctgatctttaagactatctaatcgttcttcatttgccatcgtttctttcccctttcactattctaacttcattttacgagtcttcagtagataatgtcaaaaagaaggccttttttcgtaatcatggtatacttagattggattcattttgatttttaaattaagaattggagtgtggtaccatgacatttttaatgactttttcaaataacgagaccgttactttaccggaaacagcacgtttccacgcttggaaaaatgatacaagttatctaagcgttgatgaagaccaagccttctatttagaagcaattttctcagggagctatcaagaagctttggaatctgctaaagccaatcaacaaactgatagccaacccgttaatgtcctcgccgggttattagccagtgccgattggttaacacttgatgatcatccagataaatactatcgcactagcacgattgtttcattagaagtgcaatcaaattaaaacacaagccttagtctgatgactgaggcttttttagtgattcgttgcgttcagatcaagcccattatacaattaactaaatcatttgctttggaggctaattaatgacaattctattgacgattcttttaatcatcagtgccatcaccagcatttattatttcacaaaaaaaacttatcatcgtcgcttctggttgagcctggcgtttttgcttgtggcaatcatcggcttaggcaccaccaatacactgattaatgcggccagtgcctcaaaaacgaaggttcagcacgtttcgaaaaaagaaggccaacgtgccaaacaagaagcactcgccaactcaacctcacttaaaaaacaactagcagccaaaaaatctgaagctagcagcttatcaatcgcggtttcagaacaagaagcacatgttagttcacaagaagcggctactgaaagtagtgtgcaatcgactgccacggttgatacaacccaaacaaccactaatcaagctgaagaaatggtgacagtggcacccaacgccggtaaaaaataccatcttgatgcgaactgtcgcggcctaaagcgtgccacgagtacaacaaccatgactctggccgaagcacaagcacaaggctatacactttgcggctgggaggattaatatgtcaaaattaaaagcaaccaccactctcattatcgggttactccttgcaagcagccccctcatcacgccgaagccgatccaagcagcttcagggactgcggattatcaacaagctcaaaaaattaatcagaagaataaaaagaccggcaagaaaatcagtaaattacaacgtcagattaacaagctcaataagcaactcgctaaactggcaactgaaaccaatacccccatcgctaatacaacaaatcacgctgcttctgagctggcaacattagattatcaaggtgataacgaaattatcgtcaacaataaccagcctacctttacaacggctgaccttgccactacaaatggaccctggcagacttttagtaacctcgaccaattaaatcgggccggcactgccaatgcgctcttaaataaaagtatgatgcccactgccaaacgggaaggccttacttggaacccaactggctggcgtaacaaacgggtgaaatccggttggctctataatcgtagtcatttaatcggttatcaactgactggtgaaaacaacaaccctaaaaacctcatcaccggtacccgccaattgaatgcccccgaaatgttggctcatgagtcggatattgcagcctatcttaaaaagcatccctcaagtgacgtgcgttatcgcgtaacacccatttttagagggaatgaactactggctcgtggggttcaaatggaaggtcagtcaattggcgataatagcattcaatttaacacttatatcttcaacgttgcagatggtgttactttaaattacgcagacggttcaagtaaaactgccgaataagcacattaagcaaagccttttgggactttgcttttttatattgtctaacagaattgtcacccagaatttaatgcttatcatcaaacttaaaacgtgagataatatacccattaaatcttttaggggagttaccttatgcaaacaaaatcacatcagatactgaataattttgatatcaagattctaggaatattactcatgtttgttgaccatatccaccagatgttcgccggagcaggcgtccctgactgggtcgattggttcggtagaccagtcgctactattttctttttcatggcggttgaaggtttcacgcacacacgtaaccaaaaacgctatctaactcagctgctcatcggcttttgggtgatgaatttgggtgatcgactcattcagcaattcttcacagttggtgatatcgctttatccaataacatcttcacagatttatttattgccgtcctagcaatgtatgggatccaagaaatcacagctggtcgtcgggcccataataccaagcaaatgataattgggtttttagctattatcgtgccaatcatgatgtcggtactcgttatcttgttactagttaatcccaaaacagcaatgttagcagcaaatatcggcatggttattccaaccatcacacttgctgaaaattctatttttctttatatcggtgtcttcttttaccttttccgcaataatcggttactgcaatgcctgacaattattgtttttgccgttattaacgcaggcgctaactcaggttttacctttactggtttattaacgactaatacccaatggatgatgatttttgcgattattccgatcctgttgtacaacggtcaaaaaggtcggagtatgaagtcgtttttctacttcttctacccaatccacatttggttattatacattctcgcttcattcatcatttaataccgcttaataagctaaaaactgttaattagtaaacgcaatatgccataatattattaacagcaaagcgtttttcttatcgtttaaaaacgttaagcgctgattaatggaaaggggcttttatcatggtaaaatcatatcaaagatattgggcacgtattcttgatttcacggggacctcaaatcgtcccgatttttggtggccaattattattaattatattttaggtggcattattattggaattattcaggcaatgaccgggcatccaatctcagaaatttataacattggtgatttaggcatttcgatgggccgtaatatcgtagttttcattgtatggatcgcaactttatccgttaaaatccgtcgtctgcacgatacagaccgctcaggttggtgggttctcattgaattcgtaccactgatcgggacaatctggttctacatcttaatgctcctaccaacaaaaacaaatcgttgggcataagcaattgatttaacagtcacactggtggctgttatttttttgcaacaaaaaaggcatctaacaccgttacggtagtgttaaatgccttttattaagccaactaattggcttaacccatgttttatccaatggagccggcgggggttgaacccgcgtccatgcgcattgccacgtcaatctctacactcatagtcgaactatttagaaattcgctagcccaaaacgccgttcaacagaggctcggatggactaactagcttgaaaatctcttttaaacacttcaaacggcggcatttaacgtaacccaattaatttgagacccggatctaacccttgggtgaagtcagacggatcacgctatgctggtgtttaggcagctacagcgtaagaattgttattgtttgcagttataattaactgtaacgttgttaacgcagacgtaacctacgaagtgcaattcacgctcacctacacatgtcgaatccgtaacggccccgatatgcatagcatattttatcataaattcgcgtaatataaaaggattacgccgatttaaccactaatcgtttctcagggaaccgttctttgaggaatttagctagcgttgcgctatccaatttaaactttaacgtcgtaatttgaatttgaccgctaaacacttgcacgaccgtttcggcctcttttgtgattaattcaatcttagaaattgcggcaaattgacgaaccgtatttaaattagcaattagcatggtcttagtaaacccctttggccaaaaggcgaagactaacaagatgatgaccgacgcaacaccggtcagtttatcatctaccgatcccgtgacaacaacactggcaatcagtaacccaattgcaattaccgttaaaatgatgcgcatcacgcgactactcttagcgcgatataccatatgaaactgcacgactagccaaatgactaataaagacattgctaggatgctataaaaaattgtaaaactcgacattgctttgaacctccaataaaaaaggaccagcaatacgctgatcactttttaaacttatttaatttgaccgactgacataacgtctctggcgatcatgacttcttcatttgtaggtactaagagcaccttaacttttgaatcatcagtactaataatccgttcttgtgccatcacgttattccgttctggatcaacttcaacaccgaaatagctaaggcgatcgccaattcgttgacgcattaaaatatcgccttcacccatcccagctgtaatcactaagacatctaagccacccataatcgcaacgtatgaaccaacatacttgattagacgattaacaaaaatatcgattgccaattgtgattctgggcgttcttctcttgtcttttcaagatcgcgcatatcaggtgataatcctgaaataccgtaaattcctgatttcttgttcaagatatcaatcatctcttctggatccttgatatctaatttcttcattaagaaagcgactaatgacgcatcgatatccccagaacgggtactcatcgtaacaccagcaagtggtgtgaagcccattgaagtgtctaatgatttaccatctttgatagcagtcattgaaacgccactaccaagatgcatagtaatcatcttcaaatcttctaatggttttcctaacatttcagcagcacgatgtgaaacataacggtgactagtcccatgagcaccgtatttacgagccccatatttacgataataatctaatggtaaactgtaaagatagttttcttcgggcattgtcgtgtggaaagaagtatcaaagactgccacttgtggcacattaggcaaaatattacggaaagcacgaatcacaccagcttcagcaggattatgcaatggtgcatattcagctaattcttcgatacgttttaatgatgcttcagtaatcaaggctgatgttttaaaatcttcgcctccggcaacaacccggtggccaatcccactaatttcagaatattcagcaataatcttaaattcgattaacttcttaagtaataaatcaaccgcaacatcttgagtttcaatatcttgcgtgatttcatatttttgaccatcaccatatttaacagtgaagacagaatcggataagccgagacgatcaaccatccctttggcaatcaccttttcttcaggcattacaaataatttccattttaaagttgaactgccggcattaattgctaaaatttttgacatctaatcaccttttctattcgattaattaatattttctttatgccaagtccgaatctgttgtaaatacgcagcgaacgctttttgatcgtttgaatttggaaattcacctaatagaatttgcttagcttgttgggcaccagcaccttgtttttgtaagaccaaaatggctttttgaccctctttagtcttaaacaagttaactggtaagctcaataaaccttgcaagtagacgtgtttagtaatccattttaccagttgcttcgcttcatctgtttccaaaataacatttggtacaaggaagaacccaaaaccgccgtctttaacataatgcatcgtttgttcaattaataaatgatgcgcatatgagtgtccactagcagcatgtgtttcaaaatctgctgctcgttcatcaattggataaaaaccaattggtaaatcggcaaccgcgatatcaactggattaaccattaatggttcaatcgcatcttgatggaataaagtggtgtctaacccttgtaactcactactaataccggctaattctagcagactatcatcgttatcaaccccaaaaccttggagcttattacccgttagattttgaatatgattcataacagttgctaataaattacctgtaccaatcactgggtccaacactgtcttaatttgatcagcgccaccaaatacttccgccaaatatgcgactaaataaccaattgcatcaggtgtcatttgtttattaggctccactttaacttgacgaagcccttttaaggttgccagttgtaaggcttgacgaatggtctccgcatcaaactggttaagcttaaccgttgcgtaaattgtttcaagttgtgcgacagtttgcgcatctggtaaattatcttcaaccttcacacgaccaccatcagcgatattggcaattgattcagtcaatgcatctaaataggttgtttctaaattctgttcaatcaacgttgttgtttgatcaattaagtcaaacaacgtttctacagcactcttaggcaaaatagccacctctattcattggattctgttatattctagcggtaatccaacatcaacgcaagtaatacagatggttacattacaaattataagctatagtaagcgctttatcaaatggaatttttattttttacctgttatattttttatttcaaactgtttctgatagccattcttaagtgtcaccttgatttgatgctgtttccttagaattttactttcacctgttgtggctttaatcccctttaaatcagtcttggattgactagccaaggtcaatccataaagtgttttagcttgataatgattcagcaaataccgataactctgttgttgctgttgataactatgtgtcacacctactaatacgacgctgattaatgtcagcattaatatcgcgttaagtaatgcaaccgccgaatgtttaatcggttttaatcgtcttttttttagcctgttcatcttgttcctccaagaaaacttcgtgttggtagcgactctgatccgtaaaagtcgcatcgatttgaacaaacggtcgctggtagtcaagttgaagttgcttgaggttgcctaataatggcatatacccatttaattggctgacaacaaccatttcatttttcatcctttttaaatagtaaacagtctccgcttcctcccctgactgattagtgtctggttttcgaaaagtgattttggagccatcttgatcctgatgatgtgtaaaatacgcatcggctaaaaactgatctaactgaatcgtactgatatgccaattgattgtattttgctgttgttgcgtgactttaattgccttttgtaaaacacccaccgttgccaccagtaactgactcgtcaggattagaatcgccattgaaatcaccatttcaattagcgtgaacgctgaatgcttaatcggtcgtccaattaatcgcaaccgactcacctgcctttgtggttacctttaatttctgctgattagccgtcaccgtatagattgttcgccccatttgccagcgttttttcactgtctgatgcgctctcaactgctcagcggccattgctagaaccgcctgttgtgcaacttgctgttgtttaagcgtttgttgttgcttaaagtgtagtagacttaccgttaatagccagcaagcccctaatactaaggttaaggcgatgatattttcaacgagtgaaaaagccggcctacttctgaacatgtaataccccccacatcatctggactttatactgatattcacgattattaagcgttgattttaactttaaggtgcgcggtttaatacccttattatgagtaatattaattaaatgccattcggctgggttactcactgttaaagtttctggtaatacgagttgatgatttctaaatgactcaccagcacctttaaatgtgatcgtatgtgttggtgcatcccacatcacacggacggcacgcggttcaattgccacatattgacgagctgcatcccaactcgtttcaaattgatgtagaaacaactgctcagcctgttgcgcacgatattgcttaatctgataaatcggcaaccagcttaataagcttacaatcgctaagaccacgcacatttcaatcaacgtaaaaccttcatttttgcttaaccgtgccgccttcaattgtaatccccttctcctttgcgtgctttaattggtcttttgaaatatacttatccgttaattcgtctagactcttaatttgatgaccaatctcgtcgctagctaattcaacttgcgtttgcaaagtcgtcaccaaagcttgatccgttttcttctccgcgcgctgtttttgagcacctaggtttggtgcaactaataagattagtaacgcaataatggcaagaacaactaccatttcaattagtgtaaaagcttttctttttttcttcatgaaattccctccattgtttgatacagcggtaataaaatactgagatacgtacaaataataatgagcccaattaagataaataaaataggttgtaaccagctcactttccgctgtaattgcttctgtagttccgtatactgcaggttagctagcatggtgatctcatcggtcgtctgttgcgtgagattatgcttagctaataccaatcgtaacgactgtggaaaaaatgcagagcgactaagataagcatccaatgattgccctgaagcgagtacgacttccaattgtgctaccaaggtcaccagccatgtattttgttgcagttgcttctgtaaagcacaaatttctgttaacttaagcccgttttgcagacaagtgctcaaatcaaataataaacaataatgataatactgctgaatatcacgcccaatgattggccacttgaacgctttttgtaatcgaactaaaaccggtaaccggcggtaaaccataaaaagaccgctgcccattatcaaaaggactagcactaacaaaaagccccacaatatgatgcgactaagcggcgagcctgtctggtttgactcgggcgttatctgggcaatctcaggtaataaataatggcgtaataaaccgattaagccgcctaaaaaagccaaaagaaataacggataagctagcacaccccgaatttctcggcggcgtttttggcggatactttgaatctgacctaaatgccataaacattgcccgagattaccttgtaattcggttagttcaatctgaccaacataatcagttggaaaatcagcatgcgctaaactgactgctagactgtcgcctttttcaagggcttgattcacctgatttaaccactgtcgttgttttgggaagacaatcggtaagaaggcaaaagcttgttgcaatgagaaaccgttctctaatagccgccccaataactgcaagaaatcagcgtaaaattgcgcttgttgtcgtaacttatacatcgcaaccaccttctttttttgagaaataatctgaaccagttaataattcataatgggcttgcacaacgtcgtcttttgtcaccaacgattggtaggcaattcccgttagacaggcccgcaactgcagctcagaaataccaagatctaataagcgcgcgaccacgccctgtgtactccgagcgtgaatagtactcaataccaggtggccacttaaggccgcagaaaccacgtattgggctgtctctaaatcgcgaatctcaccgataatcagcgtatccggtcgcagtcgtaaactaatttttaatagctcggcgtagctcaatcccgcattatcgttgacctgcagttgcaaaaactcaggtgcaacaatttcaatcggatcttcaatagcaaccaccatcttggcactcattgattgttgggccagatgatagagactagtcgttttaccagaaccagtcggcccagcgaaaagaattaagcccgactgtcgactcatctgcgttaattgcgccaagatctgttgatcatcacaatgatagatggcaccaattggatagataaaccgaatgaccaagctttcgcggtttaaaaaatccccgaccgtcgctaggcgtaaataaattgtttgatcggctagctgtaattccgagcggccggtttgcgcacgccgagtctcgctgatatccatccccgccatatacttcagtcgatttaaataacgcgttccagtcggtttatccaattcttgattggtgaccaaatcgctctgacgacgttccgtcaagcgccagccacctattgtcggtgtaaaataaagatcttgcacatagtgcttagcacaatgctttaataaagttgttagcttttcttcagttgacatgccatcacctttcttttaagttgttacttaagattacgctagggatagtcatatttttttgcaaaaaaataaccttaaaccaatattattggtttaaggttatttcgaataatattattcttcctctggtagttcaccagcagtataaacatcttgaacatcatcgttgtcttccaaagcatcaactaaacgttggaattgttctactttttcaggatcaactggtgttgtattttgtggaatcattgttaattcagcatttgccaaagtgtatttcttttcaagaatatcacggacatttgccaattccttaggatctgtgtaaatttcaaacacatcttcttcggtttgtaaatcatccgcaccagcttctaaaatgtcttcgaacatttgatcttcatcaacatctaagccttcacgtgcaatcgcgatataaccgcgacgatcaaacatgtaagccactgaaccagcagcgcccattgtcccgccattacgagtaaatgcaacacgaacgtctgaacttgtccggttcttattgtcagttaaagcgtgtactaaaacggcaacaccacctggtgcgtagccttcataagtaatttcatcgtagttcgcgccatcgctaccgtcagccttgtcaattgcccgtttgatgttatctttaggcatgttagctgaacgtgctttatccataattaaacgtaatgcggcgttagaacttgggtcaggaccgccacttctcgcagccatgaaaagctcacgggatagtttttggaaaatcttgccgcgttttgcatcttgtgcatttttacgaccctgaatattatgccattttgaatgtcctgacatatctaactcctcttttcgattatagaattctggtactaagtcgttatctatgatagcaaattatcaactcaaaagcaatggtagtcacgtttatcgtcgttttttacgacctgtaaagtataaaataacactcataatgacaatccctgataaagcgcccacactatcgagcatgacatcttgaaaaagtggtgtccgatcacccgttaacatttggtggaattcatcagtggcggcatacccggtggcggccagccaactgaagatgcccgctaagaaagtgccttcgattcggggacgtaatcctaaataactaaataacgctaataagaaatatgtgccgaagtgggcacccttgcgcacaaagaattcgacaaacttaaaataaccacttgccttaacactttgttcactgcctgcataatggaaggagaattgactcaaccactgcttaagtggttcatttttcaagacgcgttccaaaagtgggacggatgtttgttcatgatacgtcattgatgagctataaaacaaaattgccatcatgacaagtgccaacactaagaaccaatcgctctttttcttaaacatgcttaatcctccgctaattaatctcagattacagtataccaaagttgttccaagcattaaaatcagatatactaccatttgaaagaaggttttaaaatgcccgagcaagatcgtttttaccaacctcaaaacgccaaagatgccatgcgttttgtccaaaaattattcaaccaatacaaccaagcaccactaactgaagaattagtcgcataccatcaaaaattactcgcttatctcaccaatgacgtcaccgttgaagtccaaaaacaaggcaactcagaacaagctgccaaattaaatggcatgattgtcgccatgcaagactggctaaaaattcgtgtcagcgggaaaccttacgctggcaaaatgcaacatttcaaatttatgcctgatcaacaacaaacgacatttaagcaacggacaattaaaggcagcaagcccaacaacctccggacatcgcctcgtcgttaaagacgcttgctattttagctgaaagtgctaaaatatcttttgtaagcgtttgggcccgtagctcagttgggagagcgcctgcttcgcatgtaggaggtcgccagttcgaatctggtcgggtccatcaatttaatcccataaaaaagaaccaccaacaataattgttggcggttcttttttactatcttagtcatcgtagcttgctgatgcatcaaactcacttaagctagcagcatcaaccttctcagcatttaaatagtctgtaaacttcgctgatttaataaagcccgtcccgggatttagataaatattgccatcttctcctaaaccaattaattcaacgccatcaatctgttgttcatcttttggtgaaacatcttcaatcgtcgtcagataagcaaaccgaatccccccttgtgtcacgttactatcagtcgctttaattccaaatgcttgggggcggccccacatacctgctaaactcggtgtccgataggcaattaacgcccacttaccaaaattttctgcattttcaaattggctgataagcggattaactttagtcattgtgcctcgtttttcaagataagttggcgttttggttgctgattcagtcatcactgtacttgttttataagcccctgaatccggtgtttggtacgctgcttccgacccaccgaccgaatccgatagccgcataataagctgattatcataaaccgcaaaattaaagcgttcatcaggcgctgacacacttgaccgatcacggtactggttacccgcaacactcaattgactcatgtcataaacatccccctggttatgatcaaaagaatatgaccttgatcatctaaatggtactgacccgtcatataggctactgagccagcaccataggaattgtagactgcttgccagttaaaagtaccatcttgattaaaggttagccaaacctgattcttatcaattcggcccataaaattcttaccaccaatcaacttttgcgcgaccactttcggtgctgattgatattgcttagcttgttgtgtcttgaattgatcgaaatcaaccactttagtttttactttatataatttaaccttattaattgaaccttctaaatatttaggcgttattttaatttcaattggcttattttcagctgctgttaactgatgttcgtccctatattgatatgcagttggcgttgccttttgtttaagcgcactatcacttgcgtaagtgacttcaactactttttgaattttaatgataatctgttgcgtcttcttattcacctgataggtccctgattcaacaaacttaccagcatatccgttactggcggtaatatcttgtcggaatgtaccatcctttttaaagctcattaaataatcataatctggatcttcatgagacttattccccgtataagtcccgtgataagtgccaccgctaacattattttgtgttgtagtttggtgttgtgcgtgactaatctgtttagctaacttcacttggcgactacatgcaaccaatagtaagctagcaaataccagcagcattactaatttcatttttttcattatgacgctccccctagtcatgaatatgtgtcggtgcgattgttgtcgtcccgataacccgcatattttttaaatcaacaatttctttttcgtaatctgttggatcggcgcccggaccttctcttataaagccatatacagcaacgtcaccaaagcgtctgatagcgggtgtggcagtgccttgaaagaacaatttataactgccatcactttctaaagttatcaccgcatcatcatcaacgccactattacgccagacacgccacattacattcattctttttccaaccaatagattatacagttcaactcccatattcgtatcaataaccgactcactcgttacctttagactcggatcctgccccgcaacttctgccttcaactgcgttaattcactacttccagttggtgcagtttccacttttgtggtattcgttgtttgacgcgacgtgctagttgtcgtcttacgacttttttgcgattgaacttcattttgcgcggctgtcttaaaatggttgaacgatatcatcgcatgttttgttggtcgcaactgaacgccattaacacttccctgtaaataatccgacttaattagaatattaatcggtttatcctctgctgctgtcagagccttgcccccttgttgtttacgataatcataactaattggtggctgttgatgggataaatcatattcagtcgcgtaagtgacttccacaacttgctgaatgttaatcacaattttagctgtctgcttatcaattgtgtaggtcccttgctctacaaacttggcataataaccatctgttgcagtaatatcttgtctgaacgtcccatctgctttaaacgccattaaatactcgtagcttgggtccgtcttcgtaccagccccttgataactacccgcaaagttctgtccaataatcttaatccgaccatttttagtagtaggtgacacgacatgttgctctattttttttgcatgcttagtgttgtcctgacaccctactagtcccaccgttagtagtaagaaagcacccattagtaccttgtttttaactctcacctttattcccccagtaaagtatttttacattttactaatcatgtgattagtttaacgcattaattttcttactattaacatggtccgcctaacgatgaaaactatttcttagtggactgtcagatttaactatgccgcgcacaacttaattgttgccaaatcttcgcgaaaacgttatagttatgctaatatttagggggtttttataatgactgataaaatttttacaaaagaaacactcgcacaatataacggtcaagatggccaaccaagttacgttgctgttgaaggtatcgtctatgacctatccgcaatgggaccttgggaaggtggcaaacattttaaaggcttgagagctggacaagacttaacagaagccttcgcaaactcacaccacacacctaaacgacttcaaaatctccctcaaatgggccgctatgaaggttaacaatgactttcatcaaaaaaacaccatcaattctgggcaattgcgtccacattgatggtgtttttttagaataagatcgtaattaataaaatagcagcagcaacttggaaaacgactaacccgccggcataaaataacaattgtttgccttgattaaatagtgtttttaagtttaaccgtaagccgattgcggctaaggcggtcatttcacaccacgtactcaagaaatggcagattgttccgaattgacctgggaaaagatgtaggctgttgatcacacaaaagattaaaaagcctaaaacgtaccaaggtactaagctactctttttagctaatagttgttggcttaacttcgtatcggttgcttggctttgtttcttctgatgtaaataaccaaaacccgtcactacaaagactaaacagataattcgcaagattttaaataaggttgctgtgacgacagtgccttgattaatcatggtggcactggcgaccacttgacccacagattgcaccgtaccaccaattaaaatccctcgagcaagattatcatggccccataacagtgtccctaaaactggcagtgccaacatcaagattgtccccatgagattgaccattgtgatggcaatcccagtatcttcattatccgcatcaatcacgggcgcaatcgccccgattgctgaagaaccgcagaccgcattcccaccggccatcaataagtacgtgccttcgctaaagcgcaagcgccggcccaaccagatggcaaagccaattgttaagctcatctgcaagaccgttagaacaaccccttgccagccaattttttgaatactttggaatgtgattgtcgcgcctaataacatcaccgaatattccaagagtcttttttcagaaaattttgtgcccgcggctaagcccggttgttttaaccaggtattgcctaaaataatgccaacaaataacgcgatggttgcaccacctaacattggtaaccataattgtgcaatatagtagcttccaatcgcgatgaccaatgatacaataaagccaggtaatttcttaatcaatgattgcattttactcgctccctctcaaatcaataagttaactataccgaaactctttcaattaataaaataaatctttataatagttgttattaataattttaatggaagtggtatgatgtttaaaacgctcgaaattttcaagacggtttatgaaactaaaaattttacgactgcggcccaactccttttcctgtcgcaaccaaccgtttcagtgcaaatcaaacaacttgaagagtcgctcgatgttgttttattcgaacgcaatggtcgccagcaaatcgtgcccaccaaacaggcggatttattctacgagcaatgccagcaattactggatttatggcaccaagatctccatcaactacaacatcaagaaaggcaggctaaaatcccctgccggattgctgcttcacacaccacggcggcctacttcttaccggcattacttagtcgccaccgtgatgctttagatgctttagagattgaaatctgcacgttaaattcctcgcagattatcgaacagttatcgcaacacaaattggactttggctttatcgaaaaaccattaacggaaaaagatatcgttcgcacgccgctacaaacggatcaattagttttagccggtcaaccaaccgaaccgtggctcttacgtgaaaatggttccggcgtctatcattacacgatgaattatttaaaggaaaataatttaacgctcgataacgtgatgacggttaaaagtaatgccattatcgtccaattattacgacaaggattaggtcaatcattgatttcaagtgccgcattacttgattatccagagattccctaccgaccgctttccaaacagtaccaacgccaattttacctggttaatcgcaagggtttaccccaaccaatccaggatttcgtcgcgacattactggcgaccccactaccaattgaataggagtgttccactttgacaaactcaccacagattaaaaaagaactgactggttacatcattcgtgatgttttcagttcactcggcctttccatctatattctggccgatacctacttcatcgcttatgcggtcggcccaattggcttggccgcgctcaatatcgatttaccccttttcaacctttttaatggcttaggattgatgctcggtattggtggcgcaacaattttctcaattaacaaggttaaccatcccgaaaagagtcaggcgattttcactgaagtcctctccttcggcattttattgggactaatcatcatgagtctcggtttgatttttatccatccactcctccatctactcggtgccaatcatgaaacgctcgggcctagcttggcttacctacgcgttattttaattgggagcccactctttattctcaataacttagtcctcagtttcgtacgaaatgatagcaatccacatctaaccatgattgcgaccctttctcaaagtttattcgtgattatttttgactacttattgatgttcccactacacatgggcatgatgggggcggctcttgcaacgatttgttcaccgctcgtcagccttttgattttaacgcgacaccgtcatcacccagaccgtttactcaccctcaaaaaactgacattaaacttcaaaccaacgtttaaagctgttcaactgggctttccttctttcttaaccgaaatgagtaccggcgttagcattttcgtcttcaacatcgttattttgcatttagccgataactacgccgtcgcagcttacggcattattgctaatatcttacttgtcggtttatcgttatttaacggtgttgccgttggggtccaaccaatcgtcagccgtgaatttggtaaacgaaactggcataacgttaaaactagtttaagaatcggtttgttatcagcactcgggatcgcaactggtctgtatctagtcctgcttggatttaaagaaccgatcatcgccattttcaaccatgatcacaatcaattactcgttcattacgcggccgccggtattccgttgattttcatcagctttttcttctcaagtatgaatatcgtcaacaacctatttatgacggccattgcccaaccacgattatcatttttcgtcgcgattatgcgcgggtatgtcctcttgattgggagcgtcttattattatcagccttgtttggcctaacgggtgtctggctcagtgtgccgctcaccgaattagtggtcttaatcggcggcttcttcatcacacacagcttattgaacacgcttggtgaataatctaaaaagggtaaggacaaaagttatttttgtccctaccctttttcaatattctattttaattttgcactcagtggtttctgcggatcgaccggttgttgcacaattagttcctcaatcaaataaacaatcgtttcattttccggtaaacttgtgtgtttggcatcattaccactcacaaacatcgacatgtaatgggcaatttgattttggaagacttcccgacctgccgcaacgctagaagctgggacaatgccatcatccccaccagtcgttgtgccaccaacggaatagacaaccatttttttagaaaggtgttctttttgagattttaaatccgttaacattgggctttcatctttgatgctggcatttaacccattatagggtgtgccaatcgttaataaacggcttaattgcgcctctttaggatagcgttctgcataccgcgttaatactaacccgccgttagaatagccgacaccgttaaatttcttaaaatggtattgcttagttagctgttgcattgccttttcaaaccattcagtttgcttaaagacattctcgtctccgtcattattgttttcaaaactgaccacaattaaagggactttatcgcgccaaacaatctggcccttcgttttgacttgaccatccgccatcacttccactttaagaatactatgttggcgataatgttggttaactgttttaaaaagttgatcgaaccgatcattagtgccaccactgccgggtacaaaaacaatcggttggcgatccgctttttgcgggctaaccaggccttgaaccgcaactctagtggtacccagtgtcccaattaccccaccaaggactaaacaaaaaacacaaatcaatactattcttaattttcgcatcctgaaacttctttcttacagcttgtcattaattttagttggtaaaatcatttgaatatccgctggaatcggcgctgtaaactgtcttttctgttgactgaatggatcattaaaggttaattggtacgcatgtaatgcttggcggtcaattccccaaccaagcgggccctcataaagttgatcgccaactaacggatgatttaaatcactcaagtgaacacgaatttgatgtgttcggccggtgtgaatctggacttttaagacagttaagcgctcatcttgtgctaaacgccaataatcagtccaagcactttgtccgtcagcaatcacccgccgacgtggttcaaccccgacacggccaatcggtgctttaatcgtcccaaattcaggtagtccagtccccgcaacaactgctagataaaatttttgcaattgatgttgttcaatctgcggttgaagtaagctttgggccacttggtgtttagccgctaacacaatcccgctcgtgtcaaaatcaagacgggtaataatatggggtactaaatcgatcgccccattttgttgccagtaacctttaatccggttcaacaatgtatctgtcgtattagttggtccagggattgttgccaggccagccggtttgttcacgactaaccagtagtcatcctcatagagcacttcaatcggaactccactgaccgcgaccgtttcgtcggctggttctgcaggtaatgtcagactgacctgatcgccgttttgaacttggtcagcgggactgcttaaccgattatttaagcgaaccggtagaccctgcgccttaattttggcatataggcgctgactaatcccattttttagaaggaactgtttcattgtttgtgattgttgtgtggcgacttgccatttaatttccatcacttgttaacctgctttcgaaaactcttacgtttattatacttgtaatacccatttaaattcaatccgctaacccttttagttgccaaaatgtggcggaattcgctatgctagaagtgtagtcaattcaatattggaggttacatctatgacaaaaaatgtagcagttttaattggtagtttacgtaaggattcatttagtaaggcaattgccaaacaattgatgccgttattcccagaagacatgcacttagaggtaattgaaattggtgatctcccactttacaatcaagactatgatgatcttgatcaagtacccgaagcctacacgactttcagaaataaaatgcaacaaatggacgccgtattattcgtcacacctgaatataaccgctccgtaccagccgtcttaaaaaatgctttagacgttggttcacggccttatggtgcgagtgtctgggataacaagcctgctgaaatcgtcagcgtttcaccaggtgccattagcggttttggcgctaaccatcatttacgccaatcactcgttttcctaaacatgccaacagttcaacaacccgaagcttacatcggtaatgtaatgaatctattagacgacaatggccaagttgctaatccagatacaatcgccttcttccaagtgattgttgatgcatttgttacattgattaaccgttatattgactaaaatcataattaattcaaccgtcgatcagttttcgacggtttttttgttcgtttaaaataaatttagttttaattcaaacgattcgtatgctatactaactaatgaatttatgtcattttagatacattttattcatttatgtatctattaagatataaaaactaatatacttattttgggggaaatttttatcatggcaaagaaacaatattcattaacattaatcggcctgggcttagcggtattaggtttcgttttttcgtttctagcagattctgaattgggactcatcataccatcactacttgaaattgcaggattcgttttatcaattattggaacggttaagaaggattacaaaaaattagcgattaccggcattgtagtaactagtttattacttttgattttcatactagaatctgttgctaataacgaaattgaaaaggaacaatatcaacaagaacatcccatttcatctttaatgcaacaataaatagccaatcaaaaagcccttctaaaatcagatttcgattttagaggggctttttctaatcattaccacttagtcgcattccagatacggccgtccagttcaccctgacgttgttcaatccgagttgctaatgcttgattgagttctgcgagcgcttcatagaaagcttgatcctcatacgtggttgcttgttgtttgagcatttgaatttgttggtttaaccattcttcatttgtcattaaccttcgccttcttcctggcgaatcagttgcacttgccaacctaaatcagttaacaattcaccttgttctgtcaactgatcagccaataacgcaagctgctgctgctgctctgaatcagtcgcagccgattggcgttgtcgcaactgctgttcaaaccacgccaccttttgttcaaagttaaaagtggtttgcgttaaataccgctgataatcaactaataataattggcgggctgtttcagttaaataactaaattgatgaatcgcaaatggtggtaagtaggtcattcctaattttcgtgcaaccaattcatatggccgtagaatttcagaaagcgttgcttgctcgctgccaccagcttgaaaatgtttaccagcaatccctgtcgagacaacaacccccaacgatttcccttgtagaggcatccgcccgctaaatgcaaattcaccagttaaaacagtatctaaccacgttttgagactagccggtgcagcataccaatagagcggaaattggaaaatgatccgctcatggtcacgtaataaagcttgctctgcggcgacatccagctgttgaatggttgctaaatcgtgccaagtcacttcatcttgaaacggcatcgcactcgccttcagaaaattctgaacaagcgaattagccatctcaggatgactgacaatcactaatgttttcatacactgccaactttctatttctaaaagttcattgtacaaaaattagcttcaaattgcgactaatagagttccaaatattgctcacgttcccattcagaaacttgttgacgataagctgcccattctaatgacttagaatccatgaaactttgatagagataagtacccattgaatccttaataatatcatctttagctagttctttaagtgcattgtgcaaggttgatggtaaatcagtaatatgattttccttccgttctgtttcatccatgctgtaaatgttacgatcaacaccggcttctggtgaaaggccttgttctaaccctgataaaccagctgctaagattgaactgattgcaagatatgggtttgcactggggtcaacactccgcaattcaagacgcgttgataaaccacgtgattgtgggactcggattaatggtgaacggttatggcctgaccaagccacataaacgggtgcttcaaagccaggtaccaagcgtttgtatgaattaacagttggattgttgatggccgtaatcgcacgagcatggcgtaataagcctgctaagaagtgataggctgtttctgataattgttctttgccattttcatcgaagaaggcgtttgtcccatcttggttgaataatgacatgttgatgtgcatccctgagccattgacaccgtgtaatggttttggcataaaggttgcgtgaagcccatgtttacgggcaattgttttaacgactaatttgaaggtttgaatattatcggctgcatcgactgcatcggcatacttgaaatcaatttcatgttggccaggtgcaacttcatgatgactggcttcaacttcaaagcccatcttttcaagttccaaaacgatatcccgacgacagttttcgcccaaatcaacaggggcaaaatcgaaatagccaccttgatcgtttaattttaaggttggtttgccaatttcatctaatttaaagaggaagaattctggttcaggcccgatgttaaaatctttgaagcctttatcttgcatttcgcgaaccatttttttcaagttattgcgaggatcacctaagaatggttccccatcagcagtgtaaacggaacagattaaacgggctactttgccatgttcagcttcccatgggaaaatcaaccaagtacttaaatcaggacgcaaatacatatcactttcttcaattcgaacaaaaccgtcgattgaagaaccatcaaacatcattttgttacttaaaactttgtctaattgactgattgggacttccacattcttgataatcccattaatatccgtaaacattaatcttaagaacttaacgttttcttgatccactaattgcttgattgcttctgctgtcaacatttttcgtgccattaatctagtcgccccttaatataatttagatgattgtgaaatagatggtcgttgtcctactaatccgccgaccgaaagcatttcttccgctaacaattgacgggccttggtatcggtcagatgccgctgttgcattttttgtgcttgcttgcggtagatctggcgaatttgaaccatcgtggcgccttctgctaagtaatccttaatctctaataagcgatcaacatcattcagcgaaaataaccgttggtgccccggcgtacgttcaggcaaaacaagttcttgactctcatagtaacggatttgacgcgccgtttgaccggttaacttcatcaccgttccaatcggtaaaaccgctaaatttcgtcttaattgcttttcagccatctatttcacctcacttgcgttttatcttaccagtcgacttcttaccggtcaacatttcatgttaggttttctgacatgaatgccataaaaaaaggtaaaccgttttgatttaccttttaaaagctatttttcatcaatcaactggattaaaccgcccgcaagcataaataaatgcgtaacgacgggtcccacaaatttaaagccccgtttctttaagtctttggcaagtcgggcactaattggcgctgatttatcggagaccccagccatttgtgaatcaagtaattgaggttgattgtcaacaaacgcccacaagtacgctgagaaactactgaactcatcctgcactttttgaatcgcccgcgcattctggatggtggcgcgaatctttcttgtattgtgaatcatatccggtgcttcttgaagtcgttcaacatcaaattcatcaaattgtgcaacccgatcaatcaccattcccgccatttgttgccgtaaaattggaattttactagcggctactttccaacttaaacccacctggaaaacaccaaccgttaagagttcaaaccaaatttgatcatcatcagttggcgtcccaaaatagcaatgataagcttgaacgccatctgtcgctattttaaaatcatttttcgttgtctcatctaccatcgataaaccgcctgtcctgcactttctgttggaaagcccactttcttcgctaattcgctgtaatgcgtttctaaataatcgtaacacgctgtcgtgtcatgggccatgaaaaacggtagtacccccatcgaatcatcaaattgaatgtgttcctcttgcgcataggccttcaagacttttgccaactgataaaagtcttgattggttacataatatggcactaaggattgttttgtatcaatagtgacaatggcgcgataagcgtgaccgatacctggtagtcccccaacccccgctgttggtccagcagtttggaagactgcataatgaacagcacgaattgccgttgttgccaattgcttaaccatcttcgtggccatcacttttaaataatccgtctgtttcaaactgatttgatgtggtgctaacgttattaaataaggcgtccgtgtttgccgccaatgtgtcggcatcgtttgcccgtccctgataacagcgacatctgtcaacgtttcactaaactgttgccttaagtcaacatagtaccgctctggtttttggataagctgtcccaaagcggataacggcactgtttcttccgtttcagataaatgccaatgctgtcgtaatcgcgttaacagcgaacctgatttggtaactgtttcaacgtctaacagctcgttcaagctcacgttataaagttgtgcaagtccgactaataagttcaaatccggtacacttttgtcggtttcccacttagaaataacttggcgtgaaacattaagtttatccgcaagcgtctgttgtgaataccccgcacctaatcgaaattgttttaagcgctgaccaattaacatctaaccacctccaagacctaccgtagcgaaaaccgccttttttcaccagcaacaatctgaagcaatggttaaatcagaccgctacgattcgttgcacccttatcataccacgctttacatacaaaaaaagcggtgaatcaaacgtcaatttgattcaccgctacctgtttatttttcaaagaatgttgtttgcactgcccgactaatggcgagtttaacgtgcgcataagttaaaccaccttgtaaataaagcgtgtaaggtgcccgcaatggtccgtcagctgaaaattcgatgctggcgccttgaataaaggtgccggcagccatcacgatttgatcttcgtatccggcaaagtcacttggaattggcgtgacgaaagaatcgattggtgattgtgcttgtacacaacccgcaaacttaaccatgtcatcagggttaccaaagttaactgtttgaattaaatcggttctaggggcatcccattttggcgaaacgttcaagcccatttgttccaaaagcgctgcttcaaaaacagcccctttgatggcatttcctgtaacacttggcgctaagaaaaagccttcgaacattaattgtaagttaccttgtgtggccccttcactggcaccaacacctggcaccgttaagcgataaccaatcatttcaatcaagcgttctggcccaacaatgtaaccacctgtttgggcaatcccaccaccagcatttttaatcaatgaaccggccatgacatccgcgccgacttccgttggttcgattgtttctgagaattcgccgtaagcattatcaacgaagacaatcaattcgggattaatccccttgataaaacgcaccatctcttcaattttagcaaccgtaaaactatcgcgatcggcataaccacgtgaacgttgaatcgcaacgactttcgttttagccgtgatcttcgtcttagctgtttcaaaatcgaccaagccatctgccaataatggcacgtaatcaaagccaatttgatattccttcatcgaaccaataccgttaccggccatcccgacaacttcttggagcgtatcgtaaggttctccggtcagatagagcaaatcatctccagggcgtaacatgcccaataaagctgttccaatcgcatgtgtgccagaaaccagttgtggccgaacaagggcgtcttcggtcttaaaaaagcgactatagaccgcttctaacttatcacgtccttggtcatcgttcccataacccgttgttccatttaaatgtgattctgaaatattttcttcttgaaaggcttgcagaacctttgcttgattattaatgatttgttcatctaaggcttgaagccgtggcgcaatttgagcgttaacagcttcaattttggcccgtaattctggtgctaacgaatcttgccaattcatattattcactccgtttccactatttctgtaaccaggtttggatatctgcttggatgcgcgctaagtctgcttcttgatgctcgactagattataccagttaacaggaatttggtttctaaaccacgttaattgccgttttgcataatggcgcgagttttgcttcacttgctcgattgctgcttctagtgaacactcaccatcaaagtacgggaagaattccttataaccaatgccgcgaactgcttgcggacttgttgcacggcgttcataagcccatcttgcttcttcaattaatccggcgtccaccatttggtcaacacgctggttaatccgctcgtacaagacaggacgctcgcaattcaagccaataataaaggtatcatagcgcaactccttaggcttttgttgcgagaataaaacacccgttgtttcataaacttctaacgcccgaataacgcgacgcgtattggccgctggaatttttgccgcagcatctggatcaatcttagccagcgcctgccataaatcagtttctgaatgctgttctaagtatgcttgccatttattgcgaatactgaaatcctgttcagcatccgttgcacttcccagcgtcatatcatacaacaaagcttgcaaataaagacctgtcccaccaacaatcaacggtagatgttgacggtcagtaatttttgtaatcaactgttggccttgttgttgaaagtcaaaagccgtgaaacgttcatcaatatcagcgacatcgattaaatgatgcggcgcaatggcttgttctgccggcgttactttggccgtaccgatatcaagatgacggtaaacttgcatcgcgtctccagaaataatttcgcccttcaactgttgtgccacttgtaggctaagtgccgtcttaccaacacccgtaggccctacaatgacaattatcttttcttttttcattatttcaccacactaattaacgtattttactagctattcgcgcctaaatacgcgataatgaacatatagtttgaatgaatgattgaggaggttttacgatgaaacataaattttttaaaggtttcgtaatcgggactgtttctactgttggtgcgattgccggttcactctttgcatttaagaaaaccgtgttagatcctatcgaagaagaagaaaataaaatcgaagaaaatcgtcgtcgcgctaaccgtaagagccattcagctcaccaaggctaagcgattaaagatgatcacaagacgctgccctacttttgtagatggcgtctttttttgtgctgaaacgtgcttttcaaagctgcctcctgtgctttgctacgtaccgcaaacaatcgactagcgtcgtttattcacgatactaggcaaatgctcagagtcaaatcgctttgaaaagcactctttttcatataaaaacccaaaagtctgctgtttttcactggcgacttttgggtctttttttaatctactttttacgttttgtttttcctgtccagttgttaaaacctttttggagccatttaacgttcgtaaaacctgctttgcgaagttttaatgctgcacgaacgcttaatgtaatgcctgtatcatagaggtagaccggcaaatccattcgtaattcacccatgttttgtttcaacattgggtaaggaatgctccgagcacctaagatatggccagcatcgaaatccttgcgttcacgcaaatcaacgatttgggctttacgcatgttttcttcaaatgccttttcagtcagttcgccgcctagacgcttacgttggattttatagtaaacccacacgccaattatccataacaaaatagcgatcaagataatattaacaacaaacattggattaattgtcccgattacaaacatctacaaaacttcctttttaacagattattgttggtcaaattgtaaagctaatgaagcagcaccgataacaccggcaacgttacctaagttagctaaacgaaccttcgttgtttgcttaacatttgggaatgtaaattcttcaaagtaagcttcaacttgtttacgtaagaattcaccagcagctgaaacaccaccaccgataacgatgtaggctgggttcaacatgttaccaacgttagctaaagctaaaccaaggtagtatgacacgcggtcaaccactttgacagccaaaggatctgattccttagccaagtcgaaaacaagttttgaactgatttgttcgccatcatctaacattgtcttcaattttgaattaccagcatattcttcagccatgtcacgcgcaacacgcacaacacctgttgctgaagcataagtttctaaacaaccttttttaccacaagtacattcgtaaccgcgtggttcaacagtcacgtgacctaattcaccggcagaaccagcaacaccgtgtagtaaatgaccatcagcaacgatcccgccaccgacaccagtaccaagtgtcacgaaagcaacgtcaggttggttttcaccagcacccttccaacgttcgcctaaagcggctacattggcatcattatcaactgctagtttcatatgtgtgccagcttcaatatcgcgacgtaagtattgcgttactttccagtttaagttgaaggcaccaataacagtaccttcttcactgttaacactaccaggtgttcccataccgattccgatgaaatcttctggtgtcatgttgtataaatctaaatgatgattaatcgattcaacgatatcgggcacaatgtggctaccttcatctaaaatatctgtatcgatactccaacgttgttgaatgtcgccatccactgtcataattgcaaatttagccgttgtaccacctaagtcaacgccgattaacttcttgtctgtcatttaaacttttcctccaataattcatgattgaatgtttgtttttcttccaaccgatgttcatgtactagcaccatcttagcgtcgcgatacactttaccatcgattaaaccagcatcgtagacatgacgtaactcgatactcgttagctcaatatcccaaagtcgcttaccaacatggacataaacaccaaattgttttaaaagttgttgtacatcataaagtgttctcatcaacttcacctatcatattatacctaaatttattaacgattcatacccaagtagacaaataaaatgagggtaatgacgtaaattaacccactaaccacacggtttagcgggttaattttcccgatacgtggtgcgccaagtgccatactacttaaaaagccacctaaaataccgccaaccatcccgtacatcgcattgcgattaacgacaaattgtaatccggctgttaaaaataggaataaccaatactggcgcgcaatctgaccaaaaactggattatctttgaacgcatcaccaagcattaaaaaaccaccaaaaatcccaagaacggctaagcccgctgtaatcgtttgcgaacctgttcctaagaaaaggccttgtgtgattaaacttgctaaactactgagtatatagattgctaataagcgccaatgaccaattaatgattctaattggctcccgacaaaatataaaataacacaatccattaagagacttaaaaaactaatatggttaattgaagccattaaaaatgggacaaccccacctgccagcaagccttgcaccgacgtaattccctgcgcccaaatcattggtgcaacaaacattaacccaaaataaaggacgttcatgataatcaaagcataagcgacaaatggtatttctcgccaatctttggtagtatgatttactttcatctcttctccttcttaagccgtaataatgtgctttagtttaacatcaaattgatcaactgaccaatcaggcaccttcacttgttgtggctttaaagcgagtgcaacattgttcatctgatgcgctgccagatagcgatcataatacccaccaccaaaaccaacacgccaaccgtctagactaaagacaatccctggcacaatcattaagtccggcacaattggctcaccagttatctgcggctctaagacgtcaaaatgacttctctcaaggaccgttgttggtgtcaactcataaaaggccatctgacgcttaggcaaggttctgggcactacaatccgtttaccagccgcttgtgcagcctcaataatcggttgcgttgcgacttcaatcggttgattaagcgtcattccaatcacggttgcggattgaaaagccgcactgtcaattaatttttgtaacaagattgcttcttgttgttgcttgttagcgggttgttgggctaaacgctgtaacgctgccaaaccctgttgtcggacttgttgcttagtttgcacgaagacccctcctaacaaaaaaagcccgggcaagcgccccggctttttttatgcgtcactatttagtttcgcggtgtaaagttactttgcgttcgcgtgggcaatatttctttaattccaagcgatctggattgttacgtttatttttgtttgataagtaactacgttcgtgacattctgtacattccattgtaatgtgaacacgcattgatatagcctccaagctgtaagtaaatttctaaaaaactgtttaattcttagactcttagtatcataccattttttctagtatctgaaaaggttaattcgcaatatttcattttgaaatattatttaatttgtagtaatcggtaatcatttcacgcgccaacaaggtattgtagtgcccttcatcggatgtcaagttagggaaaacaatcgcgatggcgacttgtggatcattatatggggcgaacccaacaagacttgatgtgacggtttccacttgcttgctgtttgaatcattaggatcttcacgtgcaaatgattgcgccgtccctgttttagcgccaaaggttggtttgatatctttcaaggtgtgcgctgtcccccaagcattagtcccgttgacaacgttgtacatcccttctttaacaacattaaagtacgattttggtgcgttaatcgtgttcaagaccgttggactagtcttagattcgagtttacctagatttccatccgtccctgtttgttgaatggaatccaccaaataaggtttcatccggttaccaccgttggcaattgctgaaatatattgtgccaattgaatcaaggtataggcatcgtagttcccgtaggataaatccagtgcggaacccacggctgtactcccatcatccgttaaagttggtccttcaatcccttttgcttcacctggtaaatcgatacctgttttttgacctaaaccaaattgattgaagtaaccccgcatttttgtaaagatatccggtgaaatcttgatgctcttattgggaatgtactcagctttcccttcgcgcaatgctaattgcatcatgtaaatattggaagaaacttccaaagccgattgtgctgataatgacccgaaagtccccgctgggtaaacagatttcttaactggggtacttggtaaataaattggcgtatccggcaaggtattattagttggtgaaataacaccgtccatcatcccacccatcactgtggcccctttgacagcagaacccatgacgaaggtgcgattgataacccctagcgcgtcatcgctggcttgcttagtagtacggtcgttttgttcaccagccatcgctaaaattgcgccggtctttggattcatcgcaaccgcataagcaccatcagagtatgtcgttgcgccagcagcgactgctttggcgtaaattttcttcaaggctgcttccacttttgtttggtaggcttgatcgatggttaagtttaaattactccctttttggcccttgaaaactactttgcttgagagaatttgattgttattaccaacttccacttgggtttgtgatttagagccgtgcaaaatactttcgtattgcttttctaaataactggtcccaacccggtcatttcgtgaataaccttgagctagtaacgaattaatcccgtcttctggtaatccttgttcttctgttgaaacatgcccgataatactgcgcattgaatcaccgttaggatatgagcgttcccaatcggtcccgacattgatcccaggtaaactggttaaatgttcactaatttcagcaatttctttatccgttacattgtcattcttgatgtaaactgttgagagttgataagcaccactcatgattttaaaaatcgctgcggcttgtttttgcttatctgataagccagtaaatgacttttcaacaagatcaattgttgattgataaaccgtcttatccggaattttagaaccatcagccgctacttttctagattttggtaggcgagcattccattttttaagattcttcggattgctgaggtaataatcaatctgatcacgttccgtcaacgtatccaacttatcgatggttagatatttcgttaactgattagcctccgcatacattttatccgccaagacgttcatattcttcgtatacgtaattgctgatttagcactattgccgaccaacacacgccccttggcatctaaaaccatcccacgagggacattgcccgtcacgatttttttatcggtactattgaccatcgcctgataactcgcaccatttaaaacttgcaagcgtcccaattgaataatcaaggctgcaaataatgcaaaaacgataaaaaataggaagttaagtctgaatggaatgtgggatctctcccggtttctcttggtttttttcttcataattttcacggacaatcagttactccttattattaggctttttgaaaaagccttgcgattctttatttaaatcttaataaaataagattgttgtacatagcatatgcttcattggttaagtttagcaaaattatccataacaagctatgcccaatctctaaattcaagtgagattatggtatcctaaagaggattaacattactgttatattttacagcttttcatcattaaaagctgttcatcaaactaatttttagatttttttattaattggaggtttctcgtgactcgattatacacttttttacgacgccactacgcgttaggccttagcttcttactcccttttgccattatttttatttatggcttaagtcgccacgtctttccgtttggcggacaaacaattatgacggttgatttagggcaacaatacatcgatttttttgcttattttagaacgaccttacttcagcaccccgataccttcttttattcatttgccaagggacttggcggtgatatgctcggtgtttgggcctactatttaatgagcccatttaacctgctcgtcttattgacgcctggtaaatggttgagctttggcatttggctaatggtattgctcaaatacggttttagtgggctgagttttgcctattatctcaagaaaagtcgtctactaagtggttggtggctgccaacactcagtctagcctatgcactatcaggctttgctattgccaaccaatttaacgtgatgtggttagacgccatgatttggttgccactagtcattttaggcatcgaacaactctttgagcgccatcgtttttggttatacccacttagcttagcggccttattgattattaactattatatgggctacatggtttgcttatttgtgattgcttattttttctgggcgagtgtccatcattttaaaacttggcgccaaacttgcctcgcctatctcaaatttgccggtggttcaattctagctggcttgttagcggcttggctgttattaccgactttcttccaattaacacaaagtaagggccaatatacgattcaaaagattcactggaaaattgaatataatcccctcaagattctctctaaattggtggttgggaatttcaatttcgatcagatgccaaaaggcgaacctaacattttcgttggcagtcttgttttaattggttttatcgcctatttcctaacccgcagcattccgattaaagaacgactggccgcattactagtgactggttttctcggattatcactgtgctttgaaccactcgatttactctggcacggcatgcaattcccagtttggtacccttatcgcttctcttacgtgattagtttctggctaattgtcttagctgttcagcgattgcattatcagccacagtttaagtggtacagtttgctagcaccacttttactactagcggcatcacttgcttatactttcaaacacgtcaaaacattttcggcgttatctgaacgacaagtactccttagcgttggttttttaatcgcggtcagcttaattttaatgttgccagcacgcttcaaacgctatactaccgtctttttattactggttaccggcggcgaaatgaccgccaatgcagttctcagcttgaatcaaattagctacgtttcacaaaaggattacgctgattacaccgaacaactgcaatcagcagttgccgccgtccctaataaggtgccattccaacgcattggtaaaacgttcatgcggactaaaaatgatccgatgcaagccaattatttcggcggttcccactttaattcaatgttggaaccaagctatcctaaatttatgggcagcattggcgaaccagctggtgatggttccgttgccgataccaaccaaacgatgttcactgatgcattattaagttatcggtattatttaaacagcaccagcgtccaagcaaccgtgccgcgcagtaccaacaaacccgatttaagtgactatcgccaaatcaagcaaaacggtcagattgctatttatcaaaatgataatgcgttaccactcggttttgcggcttctgataaagtacttaagcataaagtcacggcggactatccgattcttgaacaggggaacattgcaaccaagctaacggataatccaacacttggcagtcaattatttacccttcaatatttcaacaccgtttcttatcaaaatactaaacaaaaaccgaagttaaacgaaaccttcctccgcattaattctaaaaaagatgcgcacgtgacctacaccttcacgccgacgacgaatgacccttactatttaacactgggctcaagtctcgagaagaatgctgtgcgcttgacgttaaacggtcaaccgattacgcaatacgatacctttagagatacggttgcacttaacttgactaacaaggcactcgggaaaccgcagacgttagacattgccttttcaaaggatgaaatttggcttcaaaacatcaatctctacagtcttaacttggaaacattaagcaagattacaacgcaattaaaacaatcaccgttacacatcaaacacttttcaaatacccatatcagcggtgatatcacgatcaagcacaagaatcaggtcttaatgacgacgattccttatgcccctggctggcaagtaacggtcgataaccaccccgtgaaggcggtcaaagggctcaagaacttcatcgcggttccatcaaaagcgggtcatcaccaaattaaactgacttaccggccaccttatttcaaactagggcttctaatctcagtagtatcaggactaatggcaatcttaattgcgattataacgcgttattttagaagaagacgattgttttaaaaaagactcaggacaacattgccctgagtcttttttactagcctaaacgtgttctatcagtcatatccttccggttaacgccgaatgtcaaacgattgctgacgcaatcattcgccactctctgttaatcctcaggatatacccgactgatggcacactctctttttattccgtatccgtgtccgccaagatcaacgcgttttcagcatagttaatatctttgcgtaactcatccgccaattcccatgaaatcttatgctgttccaataattcttgaatcgcaagtcgttcactcgttagcgccttgattcgtaatttttgtagttgttgttcgtaaatatccgtcttcgtatggccgatatttttcatattttcaatttgattccggtaacgaataataatttgataaatgacttgccggttataatgatgctgccggttctcaggttgcttcaagaaatacgacagttgtttgatgcccgctttagccatttccttttcggtcgttcgccattcagtgagcgccgctgtcgatttctgcgatgtttttaatctcgctatcaatcgcttcaacatcgtcaaacctctataaaacatcaattggacatgacgccaactgaaattactgccaatcaccgacaaagcaatttgcttttgccgtaatttccgtttaccacgacggtaagttttggccgtaatttcaccatcagaccgcagagtttctaatttttgccgttcaccttcaaaggcaacctgccgcaaaattaattcttctgcaatcaacggtggtaattcatcgccttctgtctgctcgttttgttgattttcaaaacggcgcatcatcagttgatattcagcaattaaatctagggccgctcgattattttcaatatggcgttgtgcttcaactgcagcaactgcaactcggtacatataaattttagcatcaaactcgcttaataattgatcatcaactggtacaagcgccgtttcatcactggcttcttcatgggcagtccctcgtaattcaatcggcgttctcaccttagttaatattgggataaagataatcgccatcaccaagctaacgataatgacgccggctgcaataaatagcattaaaccgcgttctggaaatggtgacccatcagcaagcacagtcggtacagaaagcaccccggccatcgtaatggctcctcgcacacctgaaagccctgaaaggactgaaattttaaggttatcttttaattgcttcggattcgatttgttggtgtacaacaagtaacttaatgtccaacaggttcgaattaaaattagaattccccaaaccgctaataccaagagaatttcttctcccgtattaatcagtggactatgcaccgtccccctcatcgcaactggtaattcaatccctaagattaaaaagacaaggccattcaataaataaacaccaatcgaccaagtttgttccgtcactaattttagttctggtaaataatccaagtaaatattgcgacttgcgtgactaataatcccagccacaaccacggcaatcacacctgaggcatggagtaaatcttcaaccactagataaatcacaaagggggtaatcaactgcaagacggtgtggaaaacaacatcttcaatcccctgttgcaacataaacagtcgaataaaatgaattgcatacatcaacaacatcccagcaattgcgccaacgatactgatgtataagaaatcaccggcagcttgttgaatcgagaagtagccagttaccgcagcggcaatcccgtatttaaaactaatcaagccactggcatcgttaattaaactttcgccactaaccaaatgtaaaacgcgtggcggcaagtcagcttgttctgaaatcgactggaccgccatcggatccgttggtgataaaatagcggctaacgcaaagctcgcagccaatggcaacttaggcactagcaaatgaatcgctaagcccccaatcaatgtagtgacaaatactaagaaaatcgcgtttccaataatcggtcctcgcagtgcccataattcccgcttaggaaaccggcggccgtcgttaaacaacaacggcgcaacaaacactaacataaaccaatctgttcttaatggaatctcaactgaaaaaagtagtgccaccagcaagcccaacccaatttcaatcaggctgaccggtagtcgtggtacatagtgaccgatgatattagcgacaatcaacagcatcactaacaaaataacagcttcaatgatagccatctaaatccctcactttcatgcaaaaataggggtcgtacaatgactggcccccattttcactattctgattttttaccgataattcgcacttctggttcaaggcgaacttcgaatttgtgccaaattgtttcttgaatatacgcaattaacgttaaataatcagtggcagttgcgccgccacgattaacaataaaaccagcgtgtttttctgaaacttgtgcgccgccaatttgatgtccttgaaggcctgctttttgaattaaaggccccacaaaatggcccactggtcgtttgaagacactcccacatgaaggatattccaacggttgtttagcagcgcgtaatgcgtttaactcatccattttctcgcggatggttggtgcaacacctttagccatttcaaaacgggccgacaatacaatactcccattttcttggattaaactatgccggtagctgaaatttaattcggcgttcgttaacgtttcaatttcattatcctgcgttaaaatttcggcagatgttaagacatcactaatctcaccaccgtatgccccagcattcatgaataccgcgcccccaacgcttccaggaatcccagccgcaaattctaaccccgtcaaactaccactataggcagcctcagaggtttggataatcccagctccggcttgtgcaaccacagttgtgccctgcacatcgatttgatccatggcggtcaagataatcactaagccactaatcccgtcatcacggacgattaaattactagcattcccgatcacagtaattggtaattgattctgcttagctgctactaataattggcgcacttcaggaactgacgttggtaaggctaataaatcagccggaccaccggttttggtgaaggtatatttacttaaaggttcattggttttaacattaattgtttgatttgcttctaaaaatgcgttgatttgacttaacacggctgtcgttcctctcaaataatcttattctagtttaacaaagtagaccgtaattgaacagtcaacacttcttttgcgtaattactcatagaccgttaaaatataggatagaaacgaggcgaagcgctatgaaatttatctcttggaatgttaatggcttacgagccgttttaaaaaaggattttatgactacctttgaacaattagatgccgattttttctgtctacaagaaacaaaaatgcaagctggccaagttgaacttgatctacctggctaccatcaatactttaattatgccgagaaaaaaggttattctggtacggctattttcacgaaacatgaaccactcaacgccacttacggtattcaacaacctgaacatgaccatgagggccgtgtaattacattagaataccctcaatttttcttgatcacttgctacacccctaattcgcaaaatcaattaaaacggttagattaccgcatgacttgggaaaacgcgtttagaacttacgtgcaacaactaggtacgcaaaagccggttattttctgtggtgatttaaacgtggcccatgaagcaattgatttgaaaaacgatcgtaccaaccacaagagtgctggtttttctgatgaagaacgggcccaaatgacaacccttcttcaatcaggattcactgatactttccgttatttctatcccgaccaaaccgatatttattcatggtggagttatcgattccatgcgcgtgataacaacgccggttggcggattgactatttcatcacttctgacgagctccaaccaaaattaatggatgccaaaatccatacggaaatctatggttcagatcattgtcctgtagaacttgacacacaagatttattcgcttagaataagcaaacttcaaataaagcgaggtagaaacagtgaatttcgttgcaatggattttgaaaccgccaatggtcaacgcgacagtgcttgttcaattgcactagtcgttgttcgtgacgaccaaattgtcgatcaattttacacccttattaaacccgaaacttattttagtagccgtaatagccagattcacggtatttatgaagaagatgtggcccaagcccctgagtttgatcaagtttggccacacatcgcaccttttttcacaccgcaaaaattagttgtggcgcacaatgcgacctttgatatcggtgtccttcgtagcacactccaacactacgacatcccagaaccccactatttggccctcgacaccttaacaactagtcgccggctttatccccaatttgaaaaccataagttaaatacgttatgtgccaacttagaaattccactcgaaaatcaccacaatgcactagctgacagtatcgcatgtgccaaaatcctgattaaagaagcacaagagtttggtacagacccactaaaacaggtcacgaaaataatcggctagagtgcccttcaaagcgatttaatcctaccaacaaaagaggctatcagtaactgaaatggttactgatagcctctttattagcaatggtggattaaagctaaatcaacattaaggtgtgtcattaatacatttaaccattagcgatcgcactaatgattaaatagctttttatccactaataattgtaccacatttactttattacgttaacttattttttgctgattccccggcgatttccaaaactaagaatgaaaactgtactgataaccaacaagcccccgatgacttcccaatgattgaaactcgtttttaaaaataacactgtcccaattgtcgcagctaacggttcaaaagtattcaataaaccggctgttgtgggggtaatgtaattcaaactccctaaaaagcaaaggttagccaaagctgtcccaaaaatggcaataaataacacactgatgattgtgggcatgttcattggtagtgcatccacccaaaatggatgaatcacattaaataacacgcctccaattagcattgcccaggccacaatcaccaacgtatcatacttctgaaataattcacctgggattaacgtatttaatgcacctgagaaaccaagacacaagcccaagcctaacgctgcgcctgaaatcgataactgagtgagttgccccttagtgaccaataaccaagtccccaataaagcgacaataacagcgattaattcggttcggctaggtgtcttatgatagatcacaagactgataatgataatcatgacggtccctaattgttgtaaaatcgtcgtagtcggtgcgttgctagcttgaattgttaaaaaataagcgtactggacagccgataatcctaaaatagcaaaagccaatagtcgcccagcatctcgcggttgccgccaaactgctgtgacagttttcggttgcttactgaatgcataacctaataagaagagccctgataaccccattttgacgcccatcaaccactctggtgcaattggtgtatctgtaaatagccattgtgatactggcccctgaataccccaaaaaattgagcctaaaattgctaaataaatcccttttctccgttgttgtatcacgtttaaatctcctactctatattaatcaagcgcaccatttgcaatactggcagcatgccaactgccggatcataatagcccgcttctagtttggcctcaatttgaaaaccaaattgctggtaaagctgaatcgcaccttggttacgtgcttgaactgttaatacgattcggcgcggttgtccactagcgctgattgcttgtaatagtgcgtctaacaattgtgtgccaattttttgtcgccagtatgcttttaaaacggcaacacttatttcgccaatgtgttgcaagcctggttcgggttcactcacaagccgagcagccccgacaatcttagccccatcaactgtcacccataaagcatcagttgaactatcaagcacggctcgtaacgtcagttcgcaaaacgcctcagacatcgccaagttttctgctgcaatcggtaaaaatggcgtttcctgtaccacttggtttaaaaaacataaataagcccgtgcatccgttacctgcacaggccgaattactaaagatttagttgtcaaaaatagcctcaaccaaggctgtgtaacgcgcaccgtgcggttcaaaaacaagtgtccgcatttgatcgtcgtcatcatttttattgaaatgaatcgtcaagtagtcacttggtaattcatcagcaataaattgactccattcaatgactgaaacgccatccccatcaaaatattcctctaaaccaagatcactggcgccggtttcttctaaccgataaacatccatatgataaagtggaatccggccatctgggtattctcgaatcaaagtaaacgtgggacttttgatataccgtttaatatccaaaccttccgctaatcccttagtgaaagttgttttaccggcacccaaatcaccatcgagtagtaaaacatcgcctgcttgcaattggcggcctaattttttagcaatcgtaatcgtttcttctggttgcgttgtttgcaattctaacataattcgcctcattctattgactctttgtctgcattataccgaaaaataacaagtgaggaaagcattgctatccgaagattctaaaaaagcaaacataaagaggcttaagataacgtccccattatcctaagcctctttgattaaatgctaatatactctagttttgtaatgcttgggcagctgtgatgatggctaacttatagacatcttcttcattgctcccgcgtgataaatctgagattggtttgttcaagccttgtaggattggaccgattgcttcgaagttaccgaaacgttgggcaatcttgtagccaatgttccctgattgcaattctgggaatacgaagacgttggcttgcccagcgacttttgaatctggtgctttttggttagcaactactgggacataagcggcatcgaattgtaattcaccgtcgatgtctaagtcaggtgctaattcttgggcaatcttggttgcttcttggacttttgtcacttcttcaccacgggcagaacccattgttgagaagctcaaaagtgccactttaggatcaatatcaaataattcagcagtgcgtgctgaagccactgcaatttctgctaattcttgtgcatttggattgatgttgatcgcacagtctgagaataaataacgttcattgtcgcgaccgcgttgcatgatgaaggccccacttgtccgttggatgccgggttttgttttaataatttgaagagctggacggactgtatcaccggttgagtgaacagcacctgagaccatcccgtcggccaaatcaagataaaccatcattgtgccaaagtaattaggatcttgtaaaatagtttgggcttgttccgccgttgctttacctttacgacgttcaacaaaagctgctaccattgtgtcaaaatctgcttgaggatacgcttgaggatcaataattgtaatccctgtgaggttaaaccctttggcagatgcaatgctttgaatatcagctgcatccccgattaaaattggttttaaaattcgatcagcatttaaacgggctgctgcaccaataattctaggttctgttccttcaggaaaaacaatcttaaaatcatgactcgtaatttttgctttcaaactttcaaataaatccaaaatagtaacctccataaaagcgttttatttataatctgatacaatcatacaacgtttcttatcgtccgacaagtcaataatgagagcgttttacttttgttcagaaacgtcttgtggtaattgccaattaatgggcgtcattgcccactgttttaactgttgatttgtttgtgaaaacggtttggaaccaaagaagccatgataggctgctagcggacttggatgaacagccgttaacaccgcattttgactttcatcgattaaggcccgtttggctttagccgcattgccccataaaatgaagaccacgtgcccgcgctgtgacaaggccgcaatcgccgcatcagttagttgttcccaaccttgctggcgatgggaattagcctcaccggctcgcacagtcaagacagtattcaataggaacaccccttgatctgcccaggccttcaaatagccatgattaacgggattaaaaccgacatccgtttgtagttccttatagatattctttaatgatggcggcactttaacccctggcaatactgagaaactacagccatgcgcttgatgtggaccgtgataaggatcttgacccagtatcacaactttgacttgttcgaatggcgtccactcgaaagcttggaaaatatggtgcatttccggatagaccgtagtcgtcgcatattcttgcttcaaaaattgatgcaactgaccataataaggtttggcaaactctggttctaagacggtttgccaatcattatgaataattgttttcattttttcacctcatcgattagtttatcctgttttaacacaagttgctagaagaaagtgccctcccatgctaagatataactaagtctttaaaaatacgttttcaggaggaattgaattgatttcacttatcgcatctgacatggacggtacccttttaaatgataaaatgcaggtttctgacggtaacatcaatgccatcaaagcggctcaagacgctggtattgaattcatcgtcgctaccgggcgcagtcgcaacgaagcacttccgctaatggctgaaggtggtatcaaaccagccctaattaccatgaatggcgcccaagtcttcgatcaattgggcaacgaagtcatcaacattccaattgaacccgctactgtcgtggcagttacggatgaattacgcgctagtggttactattttgaattgatgaccactgccgggaactattctgacagccaggtcaatcgcattcaaaacgtggccgatctattagtcgacctcaatcctgatactagttataaaattgccgttgccttagctgcagcgcgtctagaattaatgaatatcaactatgtcgatgatcattatgccggcattattgctgatccaaccatcaaaattgttaaaattattgctttcagtacgaaaggtcttgcggatttagaacccgtgaaggttttctgtgaagaacgtggcgatttaattgttacctcctcttctagcaacaatatcgaaatcaaccacatcaacgcgcaaaaagggattgcgctcgcagcctatgccaaggaaaaaggaattccaatgtctgaaacaatggcgattggtgataatctcaatgattattccatgatcgaagcagcaggcattggcgttgcgatggctaacgcagtgcccacaattaccgacttagctaattaccataccgctaaaaacacacaagacggcgttgctcaagccatttatcacgccattgacattaaccaagcagccgaaaagaagtgatgggttatgcctgatttatacattaagcatcaagcaagtgccttaaaaggggtctcaacgattatggatgaccaccaacggcccttgttcctcttagtcggcagtcgcggcttacgccaagatgggttttcgctctaccggctttcgggtgaattactcggggaaatcaaacagaaatcactcgggttttcacccagttttgaactatttcaaaacggccaatcaatcggcagcctccagaagatttggggtgtttggcatgaattcgtctacgttaaaaatctcaactggctaatcatgggcgacctaattcagaatcaataccgcattatctaccatacccaaaccatcatgcaaaccaatcttatcctgacaagtgccggccctacttttaaattaacgattgctaatgaggctgatcaggtctcgtgtatcctgattgcggccgttttaaatcattgggtttatacacaaccgaaggcttttatccgtaagttagcacctaatacacttcgctttagttaaacaaatgagtcaccgtcaaaagcggtgacttttttgttgcccaacgttaaattcataaaaatttgcgtcccctttttttaattggtatagttgaatatgttatttttaaaattaaaggggtctttacaatgccaactggcgtcattattaattcattatccgtcttattcggcggtattatcggtggtttattgggtgataaactatccgctagattcaaaacagagatcactttaatcttcggcgtttgttcaatgggaatgggcatcaacgcaattgtcgtcatgcgaaatatgccggccgttatcctcgcaattgtcttagggactggcattggactagccgttcatttcggtcactggattgatcgtggcgccatcttaatggaaaagcccatttcaaaactatttccagttcgtaaaacaactttgaccgatgctgaatttatttcagccctcgtaaccgtcatcgttttattttgtgcaggcggcaccggtatctatggtacgctcgatgccggtatgactggtaatagcaccatccttatttccaaatcagtgctcgatttcttcaccgcagcgatttttgcttgcaacttagggtatgtcgtttcagccattgccattccgcaatttatcatcttctatattattttcttactcgctaaattaattttcccattaaccacacctaccatgattgccgatttcaaagcctgtagtggctttttaatgctcgcaactggtttccgaatggttaaaattaaagagtttcccattgcggatatgattccggcaatgatcctcgtcatgccacttagctggctatggaccacggtgatcatgccgctgttatcgtaaaattaagattcagtcaccaaactaaaaaacgttattagcattcgtgctaataacgttttttaggttagtaatcaatacgataccggatactcataccgacttttaatcaattcgtgtgcttcatttgactcatataaattgcgagactgctgattctcaagttcaatttcataaagactacccactggaaaattccgaattatttctatgggtaaatattgcttcatcattggttcagatagtccctcatcgtcggattcaatcaaattagcgagcatccccgttgacatttcttttgtcgaaacatatcttctaatgtaaaaataggttctactgtttgtctgtcgacttagccactggattctccctttgaaggatttagtctttagccacggataatgcgctaaaaaacgacgccaaaaagttaattcggttgagtaaaagcaaatcccccgccattggtcaaatcatttatttctgttctatcggcacttccttctaataaaccactcagcaattcagaaactggttgattgaattctgaatattcgttggacttctccaaaagcatcgtttcatgttttgataagtcaacaatattagggattgtcgaagtgccccgaaatgaatactcactatttcccgacatcgatttcatatatagtctggtcaaagcctttttacgttgcgctttcgtaaatttaacggttacgtcaaaaccacccgcttcatcagccaacattcgatcatgcgttatcttgggtgctatccccagcaccgttcgataataacgatcacctgctgccatatatggtccgtattttgcttttggcacatgacacatcgttaaaatcagtacaccaaataacagcatgacggttagacagccaattgaacaacccgttgcacagctcatcgtttttcgcttcatttctaaatgataccccaattctaccgttctatagttaacgcattaaaccactttttcattagtataccatcgccatgattaaagtaaaagactcggacaaacgtaaatttgtccgagcctttttctaaaattttaatttaaattgctttgaccatatgttcataacggtgatcaccaatcattagctcaccttttttaacaaaacccatgcgctcgtataatttcttagcaccgggattttgtaaatcgacgctgaggctgattatcttctcgccgcgttgtttcaagtaatcaggcaaagccttcaaaagagcggtcccaacgccacgtccttgtgcgtgttcagccacagctagtgtgtctaaataccattcacctggttgggcttctttatccgtgaaaaaacgcgtttcttcaggtaaaccgatttgtgggaaaagtggtgctaatacatcatcgatgtgggcttccttttcttctgggaaaccaacgacaatccctaatatttcaccgtcttcttcataaacaagcgtattagcatagctataccggtattctggcatctcaaatgcttgttttaagatcttaaatagattttcgagcggtatctcctgaaaaagtggcatctccatttcttcaaaaacaatattaataatgggtaagacactttgtgcatcttcaattgttgcttgacgaatcattcaaaaacctccttcaatatcctttaagcatacgggggaattcacaaatcgtcaactttcaactaatctaaatctgcacgataatccgccattttcttagcgaataactctccgttagtcggcggcgtgtaggtcaacgcattggcgccagcctcaatcgtacttagaatagtctcttcatcatgcccacccgtcgcgatgattggaatctgagggtatttttgccgaatcgctttaataatcgctggtgtcttcgccgcaccacttacattgagaattgaaaccccggcttcaatctgggccgcatagttctgacgttcggagacaaccgtaccgacgattggcacatccactaccttattaatcattttaatggtctcaacagaagttggcgcattgaccaccacacccattgaaccagccgcttccgccaataagcccatgtacgctgagcgactacccgctgtcagcccaccaccaatcccgtttaaaactggaatggtcgccacgttactgatggcattcattaccgcgggatgcggtgtaaacggataaacagctaatacagcatccgcattcgtattattaacaatcgccacatcagtcgtgaaaatcaacgttttaattttctgacctaaaatcttaataccaccaacttggcgcgcaattgcgggtggtccaacaacactcgttttaagtggtgtataaatttctggtataaatttttctgtcattaatcagtcctcctcatttaaaagttgttgtaatcgctgcgccaatgccgttagttgagacgtattgagacgcgcaaaattaattcgaaaagcagcctggtgtgcaccgaataatgtgcctggtgctagtgccacatgcgccgcaacaaatggtgctagtgcatacggtttaactgctcgtgtcccccaaatataaaaaccgccttgcgctacactgaactgccagtcaggcaacgcttgcgccaaaagctgttgcgtctgccgtgcccttgtctgtagttgttgacgcaatgtgaccaattgcgtttgaaaatgcggctcctgaattgccaaggccgccatcacttgcgacataatactcggaaccaaatccatttcccgctgaacacgcaccaattggtcaatcacttgcggcgttgcggcgacccacccaattcgggtgctggcacccatgatcttggacaaagaactcatataaatcacattttcaggatcaagttgcttgagcgttggcaaggctggtgtcgtttcaaagcgtaaccaaccaaaaacatcatcttcaacaatcggcacttgataagtctggcaaagccgaataaccgcctgtcgtcgttctaagctcatgacttgacccgtcggattttgataatttggattgagaatgactaatttaatgcgatgctttacaatcagctgctccagcgcagccaattgaatgccttctgcatcgagcggtgcaccaaacgagcgaatccccgttgcctcaaataaggttgcttcatggaaaaacgatggcgattcaaccgctactgcatcccccggtaccaataagccttgtaatactagaaagagcgattgttgcgcacccgcggtcaataggagttggccttcaggtaacactaatttttgattctcctgattcaagcggttaatcgccgttaacaatggggcatacccaagtcgtgtttctgcttcttgagcttggttaaaatcttgccacgttaacggtggaaattggaattgtggcatcaaatcagccggtaagtcactcgaataaacatcgattaaatcggcgggttgctgtgcaattaattgttgcagtgccttgcgctttacttgcccaacttgaaaaggttgcgacgttaaatacgtatgccaattaacgcgccgctgtgcttgttgttcaccagcctgttgactgacgaaagtcccactgccaacacgccgcaccaacataccatctgtcgtcagctcatcaaacgctcgcgtcacagtcgagcgattcactgttaattgtgttgctaaccaccgttctgccggtaattgttcgcctggcgataataacccctgctctaacagattaatcaccatttttttaatcgctaaatattttggtttctgtgttggtaaataacgtgcccactctatcaagtcctcacctctctttaagtgtataaattggctggtaaaaaaacaagccaattggctcttttgtcaccgcacactatccgttaaggttaatataaccaaaaggaggcggcttatgtcaaacattctaactattgctggttctgatacattgggtggcggtggcttacaggcggatttgaaaaccttcgaagcctttggtcacttcggtgtcagtgctgtgacctgcctcgcaacggtcatgccggatcaaacttttcaaattcagaatatcgaaaccgaaacggtattagcccagattgaagccattttgcattacgtgccactaacgactatcaaaattggcttaatcaacgatgccacgacacttgaaaaaattggtcatcttttacaaaaacaaccacatttgcaaatcatcacggatccggtcttggccttcaaagaaaccactgataagctgcaacaacactatctagatagtctgaaggaattcttattgccgcaatccctagtcgtaacccctaatctagttgaagcccaaatactaagtggcttaccccagattcagacacgggcagaactggaacaagccgcaaccattatccaatctctcggaccacaacacgtcgttatcaagggtggacaacgattccctgatgatgacgccatcgatttgttgcatagtggcacaactaaccactacctcagcgcaccacgcttaactagcgcaacccgcaacggtgctggttgtaccctatcagccgccattacggctgaaattgcaagcggtcatgccgtttatcccgcagttaaagcggctaaacaattcgtctatcacgggattcaaaatgggattcaactgcgccacggcttcggtaatgtgcgccaaggaggctcatatgaattttaagcagcgtcaaatacccgttattgcgattctaacggccctcaccgtttctttatctatgttattcatcattcccgtcccagcgactaaaggttttgtcacgctctgtgaagtgggtatttacaccacggcaattattttaaagaatccgggcggtctagcagttggtgcgttgagcggtttactaatcgatttattgtcaggttatccggaatggtgcttgttctcccttttaattcatgggacccaaggctttgtagtcgcgtacctcacccgcaataatgagcagcccagacgcttactcatgccactgctatgcgggagcgtcatcatggtcgttggttattgtttagccacaagctggcttttcggttggaccgcaggaatcgcctctatttttagtaatatcgtccaaaatggctttggtattttagtcacagttcccttggtcaaacaactttaccgggttcgtccccaactttttagtgaataggagttttttatatgtcaattaatctcaatcaaattaaacaggatttaactcaaattaccaacgacgtcttaacagccgccaatttacgccgtggcgatatcttcgtgctcggttgttcaacgagtgaagtggttggcggccatattggcaaagcctctagccgcgaagtcggtgcaacgattatcgaaacccttttagaaattctcaagccactcgatatccaattagctgttcaaggttgcgaacacatcaatcgtagtttagtaatggaacgttccgtcgctgaggcacacgattttgaaattgtctcagtcgttcctgcaatgcacgctggtggggcttgttccgtcgctgcttttgaacaatatagcgaccccgttgaggtggaacataccgtcgcccatgccggccttgatattggggatacggccattggcatgcacgtgaagtttgtgcaagttcccgttcgccctagtctcgatacattaggtgctgcacacgtgacagcactccgatcacgaccaaaatacgtcggtggaccacgcgctacttatgacatttaagcaaatctaaaaaaggcattcagaaattaatctgaatgcctttttatattcgtcactctaagttaatgctcaaaatctgattgagctttaaaaccactcttatttgaaacgtgcttttgaagctagatttctgcgcttaacgacgattgtcaaatcagcgatttcatcgctaattcaccactctatgttaatgctcaaaatctgatcaagctttaaaaccactcttacttttgaaacgtgctttgaataccaactttctgtgctttgctacacttgtcaaaccggcgaatccttcgccaattcgccaagttaggcaaatgctcaaaagttacccggtatcaaaaccactcttatttttgaaacgtgcttttaaaactagcttcttccgtttagccacgttagacaaataatcggttccatcgcttatttgtctccctgagctaatcctcagaagctaaccagttttaaaaccactcttattctactgtaacactttttgctaggtttcttggttggtcaacgtcgtagcccctttgaagacttgcataataagcaatcagttgtcctgggatgatacctaataatggtgctaataatggattaacatttggtaagacgacttggtcgccagcttgtgcgtgatcttcgctgacaatcgttaacgtcttagcaccacgtgcgcgaacttcttgcaagttgccccgcgtatgatcgatcgtcttagcatccgttaagaaggccattactggtgtgccatcttcaatcaaggcaatcgtcccatgtttcaattcaccggcagcaaagccttctgcttgaatatatgatatttccttcaacttcaaggcagcttctaaactcaaggcataatcttcgccacggccgatgtaaaaggcattgcgcgttgtcttcaagtacatcgttgtaaaatcttcaatcgcttgtttttcactcaataaagtttccatccccgttgcgactaaagccaactcatggttaacgtcgaaatcttgggcggccttgatagcggtatggcgaccaagtgctactgccaagaataattcaactgcgatttgagcagtgtaagccttcgttgaagcgaccgcaatttcaggacccgcatgaagcaacaatgtataattggcttctcgtgaaagggttgacccttggctattagtgattgttaaacttggataacctaatctattcgtttggaccaatacttggcgactatcagctgtttcaccactttgtgttaggaaaatgaagaatggtttcttcgatagaattggcatgtgatagccaaattcactcgccacatggacttccactggtttttccgctaatttttcaaataatgattggccaattaaaccggcgtggtaacttgtcccggctgccacaatgtaaatccggtctgcgtcatcaattgccttaagaattgctggatcgattttcatttgaccagcgtcatccacatattcggttaacaaacggcgcattactgcgggttgttcgtcaacttcttttaacatgtaatgggggtaagtccccttgccggctgcactggcatccatgtcaacatggtagctatcacggtgaatgaaagtcccgtctaaatcttcaatttcaaccttgtcctttttaagagtgaccatttcgcggtcgtgaatttcaataaagtctttggtttcgtttaacattgctaaagcatctgaacaaacaacgttgaaatcagtgccgacaccaattaataatggtgatttattcttagccacgtataacgtctctggatcgttccgatcaatcatgacaaaggcgtatgagccttcaatcaacgttagggccttgcggaaagcttccttagctgatagttgttctgtcttagctaaataagcgattaattgaactgccacttcagtatctgtttcacttgcaaagttgacttggcttaaataagttgcacgtaattcagcgtagtttgttaaaacgccgttgtggaccaagtaaaaacggccatcttctgaaacgtgtgggtgagcatttgcttgacttgcaacaccatgcgttgcccaacgtgtatgaccaacaccaattgtcccttgtacttcaggaccaactgcggcttttaaaacactaattttacctggttctttaaccaaataatcgcgaccactttgactattaacataaatcccagctgaatcataaccccgataagctaatttttctaaaccatttaataaaatttcagtcgtaccttctttaccaatcacaccgacaattccacacatatcaaattcctctttttctctttggttttatttttatatttaattggtataacacttaaatataataacaccaacgtttttattgtcaacatttttattggtatatatcaatataaaacattggtatagtccttaatgaatcctgttaaattatgctatactagacctattcgaaacttaatcgggagtcttgatcatgaaaaaagctattctaacgcttcgccttatttcgctaatcgggttactagtcggggtgggtttcatcttggttgcccctcagactgtcgccttacatatcaccgctgataacatcgttgattcatctggtagtcgctccatgttgctcctcgaaccactcttattgataatcgtcaatgaattcagcatcctcagtatcaaacgctatcgccgcaacttctcgttaaccgaggcgccgatgattcttgttaaagagtggtattacatctccgctgcgattaccttgttgattactttcatttttgtgatgtatcaacaagtcacttggcattaaaatcatggacacaaaaaaagagcgtaagacaaaattacttttgtcttacgctctttttgaatcgtcgaaattttatcgtttaaacgtgcttttcgaaactgccttctgcgcttaacgatatttgccaaatcagtgattttatcgctaattcgtcaaattaggttaatgctcaaagtcaaaccgtttcaaacgcactcttggtttaaacgtgctttttggttgcaacaacttccgcttaatctaaaattgccagtaatcctaaaaccctgaattactggcaattttgtcttaatgctcagttgctacccgcaactaaaagcactcctttttaattattcaccaatttcagattgaacgactgcggcaatttggtccgcatattggttaactttttcttcagtagcggcttcacacatgacacgtaatagtggttctgtcccactaggacggaccaagacgcggccatcaccgttcatttctttttcaacagtatcaatagcggcttggatcttatcgtttgttaaccaagcatccttgtccttaactgttaagttaactaatttttgtgggtaagtttgaactggggctgccaattctgataacttcttaccggtttgtttcatgacattcattaattgaatcccagttaacatcccgtcaccagtgttatggtaatcgaaaataatgatatggccagattgttcgccacctaagttaaagcctttttcgcgcatttcttcaacgacgtggcgatcaccaacgtctgtttgggcagatttcattccattagcttcaattgccttatacaagccaatgttactcatcactgttgtgacaattgtatcttgtttcaggcgacctttttcagaaagatagtgacccaaaataaacatgatcttatcgccatcaataatgttccctaattcatcgactgcgatacaacgatcgccatcgccatcaaaagctaagcccatatcagcgcctgattccaaaacctttttaacaaggttttcaggatgagttgaacccacaccatcattgatatttaaaccgttaggatgagtagcagttgttgtgaagtcagtttctaaatcagcaaagactcggctaatcaaaccacttgttgaaccgttagcgccatcaacagccacttttaagccttctaaatcatcaggaattgtatgttccaagaattgtgtatatttcaaagcaccttctggatattcttcaacagtcccaaggccttcaccttctggacgtggtaatgtatcttctggtgcatctaaaatagcttcaatttcttcttcagtggcatcaggtaatttataaccatcagctccgaagaatttaatcccattataaatagcgggattatgtgatgccgaaatcatgataccggcacttgcttcttgaaccttaattaaataagcaaccgctggcgttgtgatgacgcctaatgataggacttcaatcccgactgacaataagccagaaattaaagattgttctaacatttgtcctgaaatccgtgtatcgcgagcaactaacactttaggccgttggtttttatcagcatgttttgttaaaacgtagccgccagcgcgacctaatttaaatgccatttctgggcttaattctagattagcaacgccacgtacaccgtcagttccaaaatattttgtcatgtctaattatctccattccatcttcttaaacgttttatgattcgttcgtatttactgtactgcttgagttgtcactactgctacttgactcactgctttgattattatcagtcgtctggctctcacttatcgtactactgctactactttgcacttggctttgactcattgaagtcgttgactccgatgaagactgcgtcgttgtttctgtacgactagtcgtcatcccagttggtgctgtcaccttaatattgaccttcacctgtttaggatgactgtcgtagacgccacttggaagcgtcaaagtcaccgtacgcgtcgtatttttagtgatatccgccatatcaatcgttaccggtaagtctgttaaggtcgctaaggtttgtttcttcccatacacggttacttgttcagtttctgaactcaatgtgtattcgtagccactcctctcaccggttttttgtagactcagcgggaccgtttttttattcatctgaacggcaattttaatattaaccgtttgaggtgaaattaaaacattcaccgtcttaccattacgatcaaccgcttgtagaagtgtttcttcattaatatcatttttggtccctttatcaggatcaattgtcgctaccactcgtgcaactgaattaacagctgccttggcaccactgacttgcacgacatcttgactaatcttaggattgccaatactatagccagtctccaaattttcttccttgacgttaacttgtactgggaattccttagtcaatttatgttcaattttaaccttaattgtagctggttcaatcttcactttgatgtctttgttaatcccggtttgtgttaatttaaccgtatgcgtcccagcacctagcttcgttaaatcaccaatcacccgaaaattcaacgtattaacagcagatgtaatcaacgcattaggacctgataaggttactttaactttttgaggataaccggtaataaaatatttatcggtatccgcgttaatttgcaatgggaccttcacagtttcactgcgggttgctagcatttgtgtgttgttattattaatttggcgcgtggtattaattttatcaacattaacgtagctaaaaaggagtaacgataagaaaagcgctaatatccggtacaaccaaggcccttctataaagtttttcattatttatggcctccttttttgaagccgtcaacgaattcttgcaataggctcaccttatcttcttcttgcgtaattaagtgtgagtttaagtatttcaagtaatcttcccgcgttaagtcgcgcattaattcgttattcttggttaacgtgacaccaccggtttcttcagaaacaacgatcgtcaacgcgtccgttacttcactaatcccgacagccgcacgatgccgcgtccccagttccttaggaattagattactttctgacagtggcaagtaagccgccgcaacggcaatcttatcctcgcgaataataacggccccatcatgcagtggcgtgttgggaataaagatattaatcaataattcccccgtcacatcagcatccaaatcaatcccggtttcaatataatcttctaacccggtattcatctgaatggtaatcaatgccccaattcgccgcttggacatgtactgaatcgccttatctaaggctttaatcaagttattttctttttcaagcttaggattgttgccccgcatcaatagcgaaccgcgcccgatatgttccaaaccacgacgaatttctggttggaagatgacgattaacgcaatcacaatccaactgataaattgatccatgatgtacgaaacggttcttagaccaaggtaccaactgacaatcttgatgatggcaatgaccatgatgcctttgaaaagctgcacggctttcgtgccccgaatcaacatgattaatttataaataaaataccagaccacaatgatatccaaaatattggctaacatgcgccaggttaacaattgtgcccaatcaactgacatggtgacctccattcaaaaaatttctttttccattataccatgaagcctttttgtttgctgatagcttcacaattaatgttgcatcttaaattctaggaataaatcgttgtatagaccaaccatctcaggtgataaatcactataaacttgtagtttattcagcactttttgacttggataataggctggattattccgggttgctgccggcaataacgctttggccggcatattcggtgttgaatagccaatgtattccgcgttttgcgcagcattcttaggttctaacatgaagtttaaaaaggcataagctgctttggtatgtttagccgtcttgggaatcacgagattatcaaaccaaacgttgctcccttcttccggaatcacatagtgcagatgtttattgttggctaacatttcagccgcttcaccggaccaggtcacggcgacgctcgcttcattttgaaccatgtacatcttaatttcatcggcaacaatcgccttaacattgggtgccatctgatcaagacgtgctttagcagcttttaacgccactgggttggtactattgacagattggccgttttcaattaagcccaccgccatcatgtcccgcgcactatcgacgaccataattttaccgcgatattttgcttgccataaatcggaccaatgcgttaagggccgatcgactaattgatcattatagataatgcctaacgtcccccagaaataagggagcgagtatttattacccgggtcaaatggttggttcaaataaggtttaccgatgttttgaaaaccagttagtcgtgaatgatcgattggtttcaagagattggccttccgcattttttcaatcatatattcactgggaactgccaaatcgtaagccgtgccaccttgtttaatcttagtgtacatcgcttcattactatcaaaagtttcaaccgaaacgtgatagccggtttgcttttcaaatttcttaatcaatgatgggtcgatataatcaccccaattatagagggttagtgtattatttttcgtataaccttgcgatttttgtagctgaaccgtcccgaaccaaagggctgcacagacgacgaggattgctaacgttaatcgtcctaatttattcatttaactggcgcccccattttctgcttccgttttgctttgtgtgcttgattgcgttgatttaataagtaatagccacccactaataatagtgagaagacaaacatcaaggctgatagcgcgttaatttctaaactaatcccttgtcgagcccgtgaatagatttcaacggataacgtttcaaaaccgttgccggtaacgaaaaaggtcactgcaaaatcatcaagtgagtaggtaaaagccatgaaaaagccggcaaaaatacctgaactaatatagggcaaaatcaccttgctgagcacttgccaatcagtcgcacctaaatcacgcgccgcatcaactaatgcaggtcgcatttcgtttaatttaggcagcaccatcaagaccacgattggaattgagaaggcaatatgactcagtaaaactgacccaaaccctagcccaaggcccaagaacgtgaagaaaatcaagaagctggccccaatgataacatcgggtgagaccatcaagatattattcaaagataaaataatatttcttaaccgccgttgcttggtggaataaattcctagcgcgccaaaggtcccaatgatcgtggcacatagtgatgataaaatcgcaattaatagtgtttctaagacaatctcaatcatccgtgtatctgcaaataaatcttggtaattttgccaagtgaacgatttaaagccgttcatattgtcgccgctactgaaagaatagaaaatcagataaaaaatcggtgcgtacaacaaaatgaagacgacaattaaccaaacatgttgccatttaatcttagcttgtttcatttcatcgtcaccttcttcttcgtcttcttttcaccggttaacatcatgataaggcccattgcgacaatcaagacaaccccgattgtcgaacccatgccccaattcatcgtcgttaggaaatgttcttcaatcgcggtccctaaagtaatcacccggttacccccgattaaacgcgttaacatgaatagtgataatgatgggatgaagatggcttgcacacccgctttaacaccggccatcgtcaaaggtaacacgacttttgaaaaggtctgccaattactggcccctaaatcgcgactcgcattcactaaagaaggatttaattcttccaaactattgaaaatcggtaaaatcataaatggaatttcaatataggtcgccaccaccaagaaactaaagttggtgaataaaatctgttgtggcccgataccaaaccaccctaagaagtgattgatggcgccatcttgactgaaaatcccgataaaggcgtatgcttttaacaagagattaatccaagttggtaaaataatgagtaacagccataattgcttatgcttggtttgatggagccaataagcggttggataactgattaataacgtaattaacgtaatcaaaaaagcataccacagtgaattaagcgtcatcttcaaataagtgccggattcaaaataagtgacataattttggagcgtcacatggttattaatatcaaagaaggattgataaacgattaaagcgaccggtgctagcacgaataacaaaagccacagcgcgtaaggtaaataataaattaattgtttttttcgcataagccgccttaatcctcctcttcataactttcaagacgcgcgtcaaaatcttcttcagattcgccaaaacgcatgacgtggacgtcctctggttcgaagaataagccaacttgttggccatctttagctgggttagtcgaatgaattaaccaccggttacgatcgtcatcataggcggtaatttcataataatctcctcggaataattgcgtatcaacggtcacgactaactgtccttggttgacggctacgatatccaaatcttctggacgtaacacaatttcaacggcttcattaggtttcatccctgcatcagcgcattcaaaaactttaccgacaatttctacttgataatcagcaaccattttcccgggcaatatattactttccccaatgaaatctgcgacaaagtgattaattggttcatcgtaaatatcaacgggggtcccgctttgaaggacattcccctcgttcataacaaagatttcatcactcattgcaagtgcttcttcttgatcatgcgtcacaaacaagaaggtaatccctaatcgttgttggagatcacgtaattcatattgcattgcttttcttaatttcatatctaacgctgataacggttcgtctaataagagaactttaggttcattggccaacgcacgggcaattgccacccgttgttgctgcccacctgataattcactaatttcgcggtgttcatagccacccaaacgcacaagtttcagtgcttcaatcacctttttttcaacgtcacttttcttaactttacgtaaattcaacccaaaggcaacattatcaaaaacgttcagatggggaaataaggcgtaatcttgaaaaacggtattaacctgacgcttattagccggcaaatcattcatccgttttccttcaaataacacatccccagaagaggcatttgtaaaaccagcaataattctcagaattgttgtcttaccacagcctgagggccccaataaggtataaaacttacctttttctagtgccatatcaattccctttaggatttgattatcgtcatacttcttgatgacgtttttaaattccaccattggttgctgcattttcgtaatcccctctacatactattataaataatggctcgataagttaataaatatcccttcaattataccgtttccagcttagtatgccaattcaaaccttgttttgttgtataatgaagctaactaaactatcggaaatgaggttttatattatggtcgcttatcaagctttggttttaacgcacgacaatgaaactgttactgctcagtacgcaacaaaattgacacccgatttaccaaaagaaggcgtcttaatcaaggttgcctactcagatatcaattacaaagaccgcctcactatgaatgctaaaagtggcgttcttaaaaactatcccgcaacacccggcgttgattttgtcggcaccgtggtcacttcagacaatcctttttttgaagcaggtgaatgcgtcttatgtacaggctacggtaccggcattagcatcgacggcggttatgcacaatacgtcaaagtccctagcgaatggctcttgaaatgtccaattgaactaacaccccaagaaacaatgcaactgggaactgctgggttcaccgcggctatcgcccttactaaaattcttagacagccttttacacgggatcacgatacaccactactaatcacaggtgcgactggtggtgttggtagctatgcgctcacaatgttagcacaacttggtttcaccaacatcacagcgacgacacgcgatctcagtcaaacggattacttaactcaactgggtgccaaacatgtcattgcaaccgatgatctcttaaccgccccactcaaacccttggcccaccaatcctatactggtgtcatcgacacacttggtggtgatgtcttagcacacattctcccttacatggcccaagatggtttagtcgcagcttgtggtaacgctgcaggctttaagctcgcaacaacggtctttcccttcattttacgcggtgtaacgctcgtcgggatcgattcggtcaattacccccgtaaggatcgcaaagaaatctggcagttgttagccactaacttcaaaccgcaaacctggccattaattcgcaacatcgcattttcagaactcgcaactgaactgagcacccccactaaacaagctggtcgcgtggtcgttaaaatcgatactgaacattaaaaaagtgattctactcgtccataacggatgcgtagaatcactttttagttagacttatttatccattttttctttgacatcgtcgatggcttcatttgttttttcagcgactttatccttagcttccgctaatttttctttggccttgcccatcatacccttggcattaccttttgcttctgtttctttgtcgcctgttactttaccggctgtttcttgaaccttaccagtaacttgatctttcatgccatctaacttctctttatttgtcatttaaaacactccttactgattagtatatcttcatggtaacgaattactcaaccattcgtcaaagtttatgattatcatttatcagtcaattgaccatcacgcatgatgtaaacttgatccgtataagctaaaacgcgttcatcgtgcgaaaccatcacaatcgtctgacccgtttttttagtaattgccgataactgctcggcaacctgaatggcacgtttgctatccaaactggcagtcggttcatcagcaaagattaacgctggctgcccataaagcgcgcgggcaattgcaacacgttggcgctgcccacctgacaagctagccgggtattgacggcgttgatccaatacccctagttccttcaaaaggtcgtctgccttattcggactagctgttttccggagtcgatcaactagttcaaattgttcactgaccgttaaaaaggaaacgaggtttgaactttgcaagataaaaccaaaatcgttaaatcgcaaggccgaccgttccttttccgttaggtgtcctatttcttgatccttaaaatagagctgaccatcactaggactttgcaagctgcccataatcgttagcaaggtggttttccctgaaccagaaggccctgtcaaaccaataaattgccctttttcaatcattaaatcgatttgcttgagggcggtcgtctgctgatcaccactgccaaatcgtttagtaatttgttctaagcgcattaaactcatattaagcccctccaatcgcatctagcggatcaatttttagaatccgccaaattgaaaatagtgcaccgaccaccgtcatcagcaatagcaccgctgaaaaggccccaattaataaactattattagcatacggcacactgactggtaataccaaggttgttagcaagttgccaatgaaaccagcacccacgccaattaagcctaggaagagtgattgccacatcaaactggatactaattgaccacctgatatcccttgagttcgcatgacaccataaaccgtcgtcttttcaatggtgataatatacataaaaatccccacaatgaaggcgacaatgattagtaaagcaccaatcattagcgcgaaggttttcacttgtggcccgtaacccggaatattatcgattaactgtttaatcgttaggttcgttaattgatcatcctttttaatagaggcaccatctcttaaaacgacggcattaatctgatcgttagccgctgggccatagcgcatctgacggaaatcctttaagctcaaatacgtgaccggttgcgtgttataacggtgatcgttcgttaacccaactaccttatatttttcagaacggccgtttaatttaatctcctgattcaatttaatcccttggagactatcatcaacagccacttcacgggccgcttttggtaagcggcccttcgttaacgtcggttttagaaaatcatcaaaatcaatgccaaaaacactcgtattttgtttttcgatttgcgaaccactaacaacccccatcatctgacctagataagcgtgatcttgttggtcccctttaatcgttggcagtgactttgtttgtaactcagaggccgccaaatttttattcgcatactgactgatcacgattcgattggcatcccaatgatcaattgctgaccggttgttgttggccaacccatacgctaagcctgttaaaaaataaattaaataggcaatcaaaaaaagtgtaaaaataattaatgaatagcgcaatttagcatgcttcatttccttaattgctagatacaatgtcctcatcctctcataaagcctacttccaacttaacatatccagcgtcatcataatatttatctgctctaagtattaaaaaaggcccgggacaaaagtaatttttgtctcgggccttttttaacatcaattgtcaatgttttgggaaagtatatttcggttcgtctaattgcgcatcataatcaattgctaggtcatagtcagcaaaaaaccaagcatccgaatcactggcgaaataagtaatcccgtctttttcaacttggccaatcggttgactgacttcagcccgttccatccctaatgaaaagccgtcatgaacagccgtttgaccgtaaaccttaccgaaaaagcgcactgcttctcctggttttaaagcgagttcctcttgaaaccaatgacttgctgcatctgtaactgtaatttgcatcttcataacctcccaaatttttaaattaatccgctaattggtgcttgatggcataaattgcggcctgcgtccgatcgtcaacttgtaacttcgctaaaatattggaaacatgcgtcttaaccgttttaagcgtgatgaataattcatccgcaatttcttgattactgcggcccttggcaatcaagcctagaacttctcgttcacggttcgttaaatcttcgtataactttgtttctgcctggtgcgtcatacgattcatcatcttattagtgacttcaggttctaaaactgattgccccgcagttgtcttccgaatcgtgttggcaatctcttcagccgtcgacgtttttaatatgtaacttgctgcaccagcttcgattgctgggtagactttttcatcatcaataaagctggttagaataataatcttggcttgaggccaagcctttagaatcgtcttagtggcttcaatcccatccatttctggcataacgagatccattaaaatcgcatctggccgtagtgccaatgccttttcgacaccttcgcgaccattaaccgcttgatcgaccacttctaaatcgtcttgcacccctaaataagttgaaatccccaatcgaaccatctcgtggtcatctacaatcaatacttttatcactttaatttcgctccttcaaaagtggtactctaatttcaacgcttgtgccttggttgggtaaactaataatcttagccgttccgccaaccgattgtgctcgctctgtaatgttatttaaaccgtaactgccagccttttgcgcaacctttggatcaaagccctggccatcgtccattactttcaataaaacggtctggccgatttttttcaaatagacttcaatttcttgggctttcgcatgccgcaaagtattggataataattcttggacgattctaaacagattatcctcaatcccacttggtagaataacattatcaatatcccaagtaatttccaccgcaattttagtcttcaattcattcaacaactgaataatcccatcgcgtaaactcttaccctccaacgtcactggccgtaaatgtaacaacaatgcccgcatctctgactgcgcatcattcaagacccgctcaaccgtcgttagcgattgtaacagctgcggattatccgcttgtttttgggccacttcgcttaatgccgacaacatcatcgtcgccgcaaataactgctgactaacagaatcatgcaactcgcgagctagacggtgccgctcttgggccaaaatttcttccttcgtctcccccgcaatgactggtggccgatcactataactttgaatgtcacgttgtaagcgtatcattttttgtcgtaattgttcaactgtttgttcgattgtcatcgaaaaattaccattatcggcattaatttgtttaaaaacgggtgattcatactgtccggaaactaaatattgtaattggctctccgtatgtgagacctgttgacgcaaaacgagataaaaaatactcgttacaaccgtcgccacaattaacgctgccacaataatataggcaattaacggtacatagaaaaagcgaaccgttgccagacttaataaccactgatcttgttgaatgctatagaaatacgcaaaaaataacgccactgaaaacagaagcgtcaacaatccggtactaataaacacaaaactgcgcgcgagtttactcatactagaatcacctcaagatcgccaatcacgacattcgtgataattttcagatggcgactttcttcatcataattggtactatacaactgaagtgactcatttttcaagtgatattgttgctcgtcaatcgtgacagtccctaacatcgccgagtggtctaaataaatcccggtgccaactggtactaaaatccgcgttttaccaaaccctttacgaatgacaatatggttatcatccttaggcaaaatcgtactgcctaaatcaataatcgtatcaccagctaagacggcaaagttaatatcgtcccattcaaaaatattcgtcccaatcgtctgatgaccaaaccaattatgccgtgtaacagttgcttgttttggcttgggagcagttgtattaatcggtatgaaattctttttgcgccatggtgcattttcaaataaattgtttaaattacggttattaaaatgactcgcatgactatggttgatcgccatgaaaacaaccgcgacaatcaacatcagccataatgaaaaattaatcaacaatggcactgcgaccgccacactactcatcatcgttagaaacgtcgtccaaaagccccgcttattagccattcggcgtttattagcccagactaatccgagaatcccgataataatatagactaaataaggcggataggtaataatctgccaaataaaggtcccaaagatgattgcttctacgattaaaaaaatccgccagaaaaacggcataatttggtctcctctcaactctttaaaatcattatacaagcttaatcattaaacgccaatcagtctaggggctgattaactcaaaaagagtgcgtttgaaacggtttgactataaaagttcaactaaaaaaagagccgggacaaattaactttgtcccgacccttttagttagcaggttatttttgaaacgtgctttcattaagcacaaccttccggttaatgacgcactctatttaacttccgtaatggttacgtgcatgtcgccgcctggtgtttgaaccacgactttgtcaccgacgtgtttgccaactaatgcttgggcaattggtgagtcatttgaaatcttaccgttaaatggatcagattctgcagcaccaacgatttgataagtttcttcttcgccatcttcatcatctgtgaagctgacagttttaccaacagcgatttcatcaacagcaatattgtcaacatcaatcacttcagcaaaacgaagcatgttttcaacttcaacgatccgtgtttcaagtgagctttgttcatctttagcagattcgtattcagagttttctgataaatcaccgaaactacgtgcaatcttaatccgatcgattacttctggtcgtttaaccatttttaagttttcaagttctttagctaggttttctttaccttctgcagtcattgggaattttttttgtgccattatagtcacctcgtttaattattagtcattcatatttagaatagattgaatcttcgttaccaagagatcaatcgccactcggttgttaccaccttcgggcacgattaaatctgcataccgttttgttggttcaataaattcgtggaacataggtttaactgtcttgagatattgcatcacaatatcatcaaatgaacgtccccgactctccatatcacgactcatccgtcttaataaacgaatatcatcatccgtatcaacgtaaactttgatgtccatcaaatcacgtaaccgggcatccgctaataccaaaattccttccaagataatgacatcttgtggttccacatggacaacttcatctgtccggttgtggattttataatcataaacaggttgttcaattgattgatgatttttcaacatggttgcttgttcgatcaataaatcagtatcaaacgcatctggatgatcatagttggtttcttggcgttcttcaaacgaaccatcttgatgtttataatacgcatcctgtggtaataacatcaccgaatggtttgcaaatttttgtgcgattgcctggctaacagtggttttgccactacctgaaccaccagttacgccgataattatgggtgcttttttttgactcgtcattagacgctcctttttctcaacttctttttggacagacagaagtcgaccccgcttgaggtcgacttctatgatacattactaatcttcaatcgagctcgttgtgtctgtatgttgctcgaaagtcttcgagtaataaaccttacccgtcttcaagttagccacaaagtagagataaccttgatcacgatcagctgggtttaagaccgccgttatagattgtaaacttggcgagttaaatggtcctggcccgtaacctgaatgaacatagaggttataaggtgagtcgactttagtatctttattatagagatgtgtcttatgcgtattcaatgcgtacataacagaaatatctgattgaattggcatatcaatatctaaacggttaaagaagacaccagcaatcttttgacgatcacttgcggttaccccttcacgttcaactaatgaggccaatgttaatgtttgttgaacagacaatttcttattcttcattgttgcataatatggttgtaagttttgatccgttgtcttcaccatttcggtaatcaattctttcaacgtgctgtctttatagacttcatacgttgctgggaagagataaccttctaagtgataacgaacgttcttcttagccatcgttgatgacaagagttgtgggtatttcttctcaagacttgccaagaatttcttatcttgaacctgcttcatgaaagcagccttcgagaatttggtttccttgccgactgcagttgcaatctgttcaagggtaaccccttctttgactaagaccttacccttcgaatcgcgaggacgggttggcgtcccttctttttgaaggttagcaataatcttatctaagctcattgattgtttcaaaacgtgataaccagcttggaaatcggtaaagttatgtgtcttcacgtaatagttaaagacagatgcattccgaatgagtcgcttatcttgtaagatagcggcaatttccttgttggttgatccgttaggaatctgaaccgtaatttcttgtttagcatttgtgttataaggtttcaacgatgattggacaaagcgataccccataaaaccaataatgatgactaaggctatcaggatactaataatccaatagacaattttattagctgcttttttttcagcccgtcgttcagcgtattgccgttcttcagccgttttttgatcaactggctccttttgatcagcattcttcaaaggatgacctcctaattgctcttttaaatacaatccttaaaacattataccaaattattcaaaaattgcattaaagattcgtagattaacggactttcgcttggaaagttgccactaagtgcgccacaactttttcaaaggccgcgttaacttcttcttctgttaaagtagcgtcttcattgagatatgtcaatgtataagccattgacttctcgccagcttcgatatggctgcccgcataaacgtcgaataatgatactgaaacaagataacggccgcctttttccttgattgcgttgaccaattcagcattcgtaactgcttcaggcacttgtaaggcaatatcccgtgtcacttctgggaacttaggtgctggtttggcaataattgtttgacgttgtaattctaagattttagccaagtctaattcaaaaatataagtttcttttaaatgtgtggctttcgcaattttaggatggatttgaccaacaattccgatgaatgtttcaccgacataaatagcggcagtccgacccggatgcatctctggataagcatctgttgcttggtaggcaactgctgcttgcaagttatagctagccatcaaggtatcaacaacacccttgattgtatagaaatccactggtgctgccgcttcttgccatgatttgacttggcgattaccgctcattaaaccagcaacatattcgacttcattaggacgcgcttgatcagcgtgttgtaaaaagacccggccttgttcgtacaatgctaagtctgtttgtttccgtgcgacgttgtaggccgcatcatcgagtaacccagtaaccagattcattcgtaaataagcatgatcttgcgtcattggccaatcaagaacagtcgctgtttgtttagcagctaatgcaaattgccctgctttttcttcagtcgtcaaggcataactaattgcttgggttaaaccagcgccttcaagcgtatgacgtgtccggcgaagcgccttttgttcggttgtcaaagcaccagttgtcatatcgccagttggtaatgtacttggtaaattatcgtaaccgtataaacgagcgatttcttcaatcacgtctgcttggatttcaatatcccaacgacgggcaggaattgtcaccgtcaattggtcagcgttgttagccacttcaaaaccaaaacgttcaagtaaatcaatcatcgtttgaacactcatgtcagtgcccaatacacggttgacccgtgctgaatcgatttgaattactttaggttgtggtgccaagtttgttgggctcacgaccccagcagtgacttgaccagcacccaattcagccatcatagcggcggcggcatctaaagccacttgaacatcagcgacattcacacctttttcaaaacgtgatgaggcatctgaacgtaagttatggcgttgtgccgttttccgaacagccgttggggcaaaaatagcagcttcgataatcacatttttagtattagccgtaatttctgaattgaaaccacccatgacccccgctaatgcgattggttggttaccatctgtgatgacaatatcttcattggttaaatcatgttctgcttcatcaagggtcgttaatttttcacctgttttagctaaacgaacttcaatttgcttatgatcgccagttaaagtatcggcatcaaaagcgtgtaatggttgaccatacgttaacatcatgtagtttgtcacatcaacaaggttattgatggggcgaataccagcattccaaagacgggtttgtaaccacaatggacttggttggaccgtcacgttttgtaacatccggaggtgataactaggcgctaactgttcatcagccacttgtgcactgagttgattttttgtttgaacatcactttctgaaacagctacgtcttcaaaatgaggtgtcaatgattcaatcgctgctacttcatgagccaccccgtgaattccaagcgcatcggctcggttagccgttaaatcaagatcgataatgtaatcagtcatcccaagtgcttcataaacgtcagtccccggtgcaattgcttctgggaaaacaaagatcccgtcgacatattctttaggcacaacgctatcggcaaaaccaatttcttgtaggccacagatcatgcccattgaaacaacgccgcgcatcttgccttttttaatcttcacgttatctgcaattcgtgagttaggtaaggccacaatcacatattgcccagcggccacattaggcgcaccacagacaatttggaagggctcttcttcaccaacatcaacttcacaaacatgtaaatgatctgaatcaggatgtggttcgcaacttaaaacgtgtcccacaacaatttttttcaagcccgcactcatttgcgcaacatctgcgacttcaatccctgtccgggtaattttttctgcgagtgcttctggcgctgttgttaaatctaaatagtcttttaaccagttataagatactttcattgcttaaacctcctgtgtgaattgatttaagaatcggacatcgtttaaatagaagttccgaatatcatccacaccatatttcaacattgcaaaccgatcgattccaagtccaaaagcaaaaccaccgtaaacttctggatcaacaccgccggcttttaaaacgtttggatgcgtcatccctgcacccaagacttcaatccaaccagtttgtttgcagacactgcagccttcgccattacaacggaaacatgagatatcgacttcgacagaaggttccgtgaatgggaagtaacttggccggaaacgtaaatcacgatcttcaccaaaaatgtggtggattgtgtattctaaggtcccttttaagtcagccatcgtaatgttcttatcaatcacttggccttccatttggtagaattgatgtgaatgcgtggcgtcatcggtatcacgacggtaaacacgacctgggctaatcatcttgatggggccattagcaaagtcgtggctttcaagatcgcgtgcttcgttaggtgacatatgggtccgcatcaacgtatcttttgtgatgtagaaggtatcttgcatatcccgtgccggatgatcagcaggcatgtttaacatttcaaagttatgtttttcatcttccacttcaaacccggcaacgacttgatagcccatcccgatgaataaatcttctaaatcatcaatcacttgcgttaaaacatgcggtgtgccctttttaacaggttgtcctggtaaagtaacgtcaattgtttcgtgcgctaattgagcagcttcttttttagcttctaattctgctttgcgcgcttcaattgcttgtgctaaatcactcttaatttcgtttgcaaaagcccctactttaggccgttcttcgttacttaagtcccgcataccacgcaagacctccgtaattggccctttcttgccaagtacttctactcgaatctgattcaatgcatctaaatcaacaactttttggatatcttgcaaactcttttgttgcaagtgttccaactgttccttcaatgacatttgatttcctccttatttttgccaacaaaaaaagccccgtcctcaaaagggacgaagcttcgcggtaccaccctagtttatgacctagtcatacactcaagtttgcgtaacgggcaataccggactcaacggtcaactctgaaagtgaacttcacctaaactcaactgaataacttacagtctatgattattctccctgaaagttggttgttaggttactctttttcatctttgtctataaactttattttagcgtaaattcaatgattaagcaactagtcgttcgtattgcaccattggtcagaccaattatggaccgcatccataacaggtgctagcgattcgcctttttcagttagttgatattcaatcaacgatgaatcagcactcgttatgcgagcaacgatgcccgcttgctctaattctttcaagcgttcaactaacacacgatcactgcacttgggcacactatgaaccaaatgcttgaagcgctgtgcgcccccttctaataatacatcaatgatcagaccattccacttcttgcctaaaattgagaatgttttttcaaatttaggacagagttggaaggtctcttgacagtcagaattagcattttcttttacaatactcatcattactcacctcacacttattattaataagtgtactcaaaaaggttgcaaaaagcaaccttgaggattgggcatcttttatttgttggtttgtgtggccgctgattgatggcgtactttttgtttgaattttgaccacagtggcgaacaaaattcagtaatcgcacaataatcatcaactaatgaaacgatataactctcacgatatttaggatggctgacagttgcgccccacatatgtttaacaataatatctttttccattggtgacaattcagttaacttctcagcgttccgaagagcaatccgtgggtgcacataagcatgggtccccagatcaaacttcgtatcgcgccaatcgtaatagaacaaatcatgtaataagcctgcgcgggcaactgagcggacgttaagatgccacttcttggcaagctcgtagcttcgataagaaacactgagtgaatgttctaaacgatccgaatgatgatgctgtgtgtaatttgctaatttttgaacttcttctttttctaacaaatcggcgatcagtgccatataatctgcatcttgataccacttagctgttgcgttcattcaaagactcctgactgatttaaattcaaattctgccacaagaataacagctttttgattaaaaaagaagtcatttgcttcaaaaaaaacgcttcattaagaaaacttaagaattagccttcaatcaatttaaacattaaaatcccggcagcaactgcaacgtttaatgattctgcattcccaggaattggaatgtaaaggttttgggtcgtagctgctaagacatctttggcaacaccgtttccttcattacctaaaatcaaagccatatcggcggtcttaggcacatcttgataactgatggcttcggggtttaattctgttccatataccggtacgtcttgtgagttgaatttcttcatccagtcgattaagttaccttgatagattggtaaatggaagtgactgccttgcattgaccgcaataatttaggattgtatagatcaacactcccattccctaaaaccacaccggcaaagccagcagcatctgctgtccgaatcatcgtgccgatattaccaggatcttgaacggcgtctaataataagtaacgacccgttaatttttcaggcattggtgtttctgacatctcaacaacggcaaaaatcccttgtggcgcttttgtttcgctaaggtgttgggctacttccggtgcgatttcaaaagtatcatcatataaaccacgtaaggcgcgttcatcaacgtatttttcggtggcaaagacttggcgaatcactgctttattttggatggcttcttgcactaaatgccagccttctaataaataagtattttctttacgttggtttttcttgacggttaatttcttagccgctttaatcttagtattttggttcgattgaatgtattccatgttgtgctccagtctatttagtactttctattatacgcgacttggcctgtaaattctatggggccagcgccttgctttttaatcgccaaatcaccgccaagcgattacaatggactagaggtgattaatatgcaaaaagcagtccaattagatgtatttggccgagttcaaggtgtcggcttccgctggacaactaagctggtggccgatcgattagggattactggcaccgtctctaaccaacccgatggttctgtcaaaattatcgcaatgggccccgatgccattttggaacagttcattggcgccattaaagcgtctccgacccctagtgggcgcgttgatcgtgttgttcaaacacccttggaagatgtgtcagcgtgtcataaattttcagttgtcggttgaaaaacgttgccccttacagtatagttacacttattgaaacttatcttgaaagggctaaatttatgaaaaattcaaaacgcttcgcaacacttgcgatgctagcaatgaccgttacattatttctatccggctgtatgccacaaaaaatgagtagccatcctaaagtcccaactggcttcatctatggttcatcctataaatacatcgccgtcccattacaacatattatggaacgcatcgctgatttcttcggcggcatcaatggttacggctgggcgatcatcatcatcaccttcgttgtgcggatgattttactcccattaatgcttaaccaatcaaataaaatgactgcgcaacaagaaaaaacgcgtcgtttgaaaccacaattagatatcgttcaagcacaacaaaaggttgccacaacacctgaagaaaaagccgaattaagccaattaatgatgaaggtttataaggaaaatgattcaagtatgatgcctagccttggctgtttaaccttattaattcaattaccaatcttctctggtttataccaagcgattcaatactcacccgaaatttcaagtagtcatttcttcgggattggcttaggtcaacccaatatcattatcaccattattgcgaccctcttttacgttggtcaaagcgccctctcactagttgggatgcccgctgaacaaaaaaaacaaatgcaaacaaccgtccttatgagtcctgcgattacattcttcatttcgttatttgcaccagctggtttagcactttacttccttgccggcgggatgattatgattattcaacaaatgatcacaaccttcatcatcatgccccgtgttaaaaaacgtattgatcaagaaatcaaagaaaaaccaatcgtcacagtcgtcacaaaagacatgttcaccaaaaaagcagctgctaaagcaactgaaacacctgtgacaccagaaaccacgcacaccaataaggcaacgatgccttctgaaacaggcaaacgtaactcaggcaaacaacgccacaaaccacaagcataattagagatactaaaagaggctcagacaaaataattttgtctgagcctctttttgatatccgaatattgatggtttaaacgtgcttttgtcagtaactttctgtgctttgctaaacttatcaaaccggtgattttatcaccaattcgccaagttctgcaagtgctcaaaagctaaccactgacaacacactctttttttaatcagcatcttcttctggtgcggcctttgtttctctaacgagtggcaattcaatccggaagaccgacccatgtccgacactactttcaagtgagacattaccatcgtagccttcaactaattgttgggcgatagctaaccctaaaccattaccgcctttttcccgactccgagccttatcaacccggtagaaccggtggaaaacctttttcttatcttcttccgaaatcccttcaccaaaatcttggacagcaacttgcgcataacgttcatcgttagccaccgcgatatgaatttccttgcgcgtcgttgaatatttaatcgcgttatccaatagaataatcatgatttgctcaaggtggttccggttaatattgactaaagcttgaccatgcaaatcatcatctaaaataaacgtaaattcaggatagagcatctcaaaattatgataattttgtaaaacaactttcccaacatccgtcacctcagtggtgccttgtgtcaccgcctgatcagcccgcgttaaatctaacatttcttgaatcaagttcttcatccgtaaaatttcttgcaaagaagctgctaaagattccgacaagacttccggatcatctttgccccaccgattcaataattggaggtgaccttcaatgatcgcaaccggggtccgtaattcatgcgagacatcgctcacaaattgatcttgttgttcaaagtaatgctgaatccgatttaacatttcattaaacgcaatgaccaggtccgaaagttcatcttgactccgcctagtttccggaatccgcacattcgaatttggttcaacattaatagcttcaatcgtctgcttcattgcctcaatcggctgcaagaaacgattggctaataagtaaccaattacagcactaaacaacattgcaaataacacaacaaccaccagaacgatccgtaattccagcatcgcatgattataatcccttagattattagtcacttcaacataaccgatggtgcgattcgtgttagcagtcttaatggggcgaatccccattaaatgaatcttcccaaaaatatgctcccgctttaagacatcggtgtcttgctttggaaaagaggtggctcgaccacgtgaggcgaataacccttgccgattttgatcgtaaactttaaccgtcgtatcctgctgtgccaaacgcattaaaaccgaatcttgataaattgctttagaatctctaggggctggatctaattgttcagcaacaaattctgatgttagcgtcttttccgggcgccccaaacgttgttggatgacagtcactgtatcgtgaacattatcgacttccttatgcaataaaatgttcgaaatactactgaaaatcacaattgaaaaaatcgcaaaggtgataaaaatggccaacccaactgcagctgcccatttcacctttaacgatattttacgacccttattattattttcactgggtgtctctaagtcatttgttatcacgagcgcatcacatatccagttccccgaacggtttgaatatagctttgttcgcccgttcgatcgattttattccgcaaataacgaatataaacatcgaccacgttcgtttcaacgtcggaatcataaccccagaccttgcttaacaagacatcccgcgctaagaccacgttaacgttttccattaaggttaatagtaattcgtattcacgtttcgttaattcaataatatcatcaccacgacgaacgattcggttttccttctcgactgttaaatcgcgataagtcaccgtcgtttgtttggcagcgttatgttcgccttcaatatcgatccggcgtaacaaggcgcgtagccgggctaaaagttcttcaatcgcaaatggtttaacgatataatcgtcagcaccatgatcaagccctgatacccgatcaataacggaatcgcgcgctgtcatcatgataatcggtgtatttttaacttgtcgaacccgtcggcaaacttctaacccatttaattcaggtaacattagatccaataaaattgaatcccagtcttcgtttaaagcagcttctaaaccagtacgcccattgaaatgtacttcggtcccatagccttcgtgctttaattcaagctcaacaaaccgggctaaatttttctcatcttcaataattaatatgcgactcatttagtcactccctaaaaaagaaatttaatgtccacgctgaacgttcttcgtagataagaattctctaagaatcaactcgtcagtagtagccacttactcattcattttagcatagttcctcataaataactaacaaatctcgctgcaaagcacgtccccctgattatttaagcaccacaataacgcaattggtaacgcctcaaaaaaatccagacgaaaatgaggctttcgtctggattctttagattcgattaaaaattattgttctttgtaccatgtgtaatggaagataccttcgcggtctgtccgttcataagtatgggcaccaaagtaatcgcgttgtgcttggattaagttagcaggcaatacttctgaacgatatgaatcaaagtatgtgattgcagcggttaaaccaggagcaggcacaccttgttggattgccaatgccgcaatatcccgaacagcaccttgatacttcttcgtaatatctaagaagtaatcatctaataataagttatttaaatcagctttcttatcaaaggcatccgtaatcttttgtaagaaacgggcacgaatgatacagccggcacgccagattttagcgatttcgccgtagtttaatgaccagtcatattgatctgaagccacccgcatttgttcgaaaccttgtgcgtaactcatgatcttactgaaataaagtgcttgacgaattttttcaatcaattctttcttatcttcagttaacttagcaactgttggggcaggtaaaatcttgcttgcagctacccgttcgtccttcattgctgagatataacgggcgtaaactgattctgtaatcaatgattgtggcacacctaattcaagggcgctttgtgaactccacttaccagtccctttgttaccagcagcatctaaaataacgtctacgattggcttgtctgtgcctaaatcgtctttacgggtcaagatgtcagctgtgatttccatcaagtaactgtctaattcgccgtggttccattctttgaagacatcagcgatttcttcaacagataaaccaacaacgtttcttaacaagttataactttctgagattaattccatgtcgccatattcaatcccattgtggaccattttgacatagtgaccagcaccgttagggccgatgtatgtgacacatggttggccgtcttcagctttagctgacatttgttccaagataggggccactaaatcataagcttctttttggccacctggcatcattgaaggaccttctaaggcacctaattcgccaccggaaacacccataccaataaagttaatccctgatttgtctagttcggcattgcgacgaattgtatcgccgaagaaggtgttcccaccatcaattaaaatgtcacctttatctaataaaggtaataattcgttgatgacggcatctgtaccagcaccagctttaaccatcaagataatccgacgtggtttttctaatgatttaacgaagtcttcgattgtgtaacttgcgactaatttcttttcactatgatcttgtatcacagcttctgtcttagcaccagtccggttataaatggcaactgtataaccgcggctttcaatattcaatgctaagttcttgcccataactgccatcccgataacaccgatttgtggttgactcatgtaaaaggcctcctaataagttctaatttaatggtgtattatcttctcaaattgcttaatacacttaccctgattatgttagcagaattgttcactaaagaaaagcattttaatccatttgggccggtccattttataaataagtgcaaaaaaaagacgcccgtcttaatcggcgtcgttttcttgtgcttctaacaatgctttgagcttagctaattctggattaggtgcctcggcctcttctgcttgttgcttcgcgtattcttcttcagagattactgaccaagcttgaccagttggcatcacatcttcattttcttcttccggtgtcaaaatatgactgggaatgtgcaataggatatgatcttcaaccgccacttgcatatctaacatttcaccttctaatgggaataacatgtcctcatcagggaaacgtgacaattcttcatccgttgggtcaacataaatttcagtgaacgtaaaatcaagtgggagggccactggattcaagcttcgggttgatggcaccgttaattgcccaaccacgtgtaagtcagcaatgatggcccggcgatcaacggttaattgaccactgatgacaaacggcgtggctgccaaaacatcattttctctttcgtggagttgcttttctaaatcaactgtttcttcaaaagcaagcgggtgttcacgatgcttttgtaatgcttgtactgaccattttaacaatgcgcttcatcctttccatgataaaaaatcggttgtctggcaaagttttgcgactgccagccaaattgttcacacaagcgatcgacacggacttctaagcccaataaaccagtttcggcccccattttggcggaaaccttactgataatgggaagatcagtcgtcttcttcaactggtgtaagtgttgctgcccaatctcgttaaagcccaacaaacgaatataggtccgttgaagtccctgttgaatatccgctggttgaatgtttaataaaacatataggcaaacccgttgaagtcgggcatacgtgtatcgttttgtttttagagcttgtaataactcggtgtaactattggctttatgaatcacctttttgaaacggtattccaaaccttctgacatctggtagacctgccgtaattgtgccagcgacagactctcgatgcggtattttaagagtggccatagttggtcttctgtaagaagcgtactatccgctaaggctgctagcgttccggctggtacaacgtgttgtaaggctgctaaagcggtgccttgcgtcacaacctggcgaatcgcacttgcacttgcatatggcgccgttgaaacggtctggtccccatgttgtgcttgctcccgcttgatagccaataagtttaatggttgcgctagccgtgcgttagcgacggcgtaactaatccctaatagatggtttggttgatcaatctgcaaggataactgttcctgatagaactcgttcagctgtgttgcgtacgttttttgatagtcaacaaaagcagcagattgctcaggtaagtcgataatctgctgccccgcttgttgataatcaaatgtcggttgttcactaccaaaggcaatcgtctgacagccaagcgctgctagcagttgcaccgcccccgtggcaaaacgatctgctggttgcaccgcactcacaaatggtaattcgaccaccatatccgccccattttgcaacgctaattcagcccgcgtccacttgtccaaaagcgctgcttgcccgcgctgaacgtaattcccgctcatgcagacaatcactaaatccgcttgggattgctgacgtgcttgttgaagttgatagatatgcccattatgtagcggattgtactccgcaataattcctgtaattctcatcctaacctctatttaaccgcgctgaagaaccaacgaacactgtcatcttgaaccgcttcttggccaaaatcagcgctgactttaatttgtttaaagccgaccgtttctaaagccgctacaaagtcggccattggatacgtccgttcatgatgtaattcgtttaattcttggtaaccaccaagttgttcgtcccaaacgaagaaggttaaatcatgttcaactgaatgcggcacttcgccttcataactcgtccacataaaggccgtctcttcggtccggtcattatacatgaaaccggggaataaaacgtccatttgatagagtgaatgcgcatcaaataggaattgaccgccctctgccagttgttgataaacctgtttaaagacttgttggacctgatccaaatcttgcatgtagcagattgaatcgtcaaaacaagtgatcgcatcaaatgtgcccacctcgctaaggtctaacatgtcgccttgaagtaatggaaaactcacgccggcttcagtcgctttttcagacgcaatagtcaacatttcggttgaaaggtccaagccaacaacgtccaacccggcttgttttaaaaggatggctaaatccccggccccacaagcgagctctaaaacgcggtgttgattttgcaacgtttgtaatgtgtaatcgcgccattggccatataattcatgatccattaagcggtcatagaccgttgcgaaactttggtaaatcattcttccgttaaccattctgaaacatcaaccattggtgcttcatcccatagtttttcaaggttgtataatgcacgttcttctggcatgaagacgttgatgacaaggtcgccaaaatccattaagatccaacgtgaaccttttttaccttcaattttcttaaccatcaaaccagcttcttcttcagcatcttcaatagcgtccacaatggcgtctaattgacgttctgaagaaccagtcatcatcacgaaataatcagctaataaactgatcccttccatgtttaatgccacaatatcttctgctcttttaccgtctgctgctttaacagcaatttttaataagtctaaacttttcactaatgttctcctttaatgggcttgagttggcacccaagcattgtatgtgtcaattgttttaggataaatcttcttttgcccttcaattaaaaaggtcaacgtatttaaaatttcaaaccgcacgccagccgctaaatcagcgaaggcagtttcccgcgcttgtaccacacctggaaaatcacgacccggttcgatgaagtcagcgacaaataaaatttgatcgatgactgtcatctctggggcaccaattgtgtggcgacgcaccgcgtttaaaattgtttcatcgtgaatgcctaagtcacgttcaataaagtaagcaccgacgacaccgtgccaaattgcattaccgtattgtaacaattccggatcaaagccagcttcatgaatcgcttcaataaagacttcatctggtaattgcttagcataatcatggaccaaaccagcaatcgctgcccgttcaacatcagcatgattaagctcagcaagcttaatcgcagtttcttcaacgcgtaaacaatgttgaaaccggctctcagataaattggcagccactttttgcgctagttctgcgcgtgaatacggcacaatattttcttggtaagtaaaatcactcacggtataacccttcttcctcaatataatccgccactttagtcggtaccaagtagcgaattgaacaactctgttgcaccttattgcgaatctgagttgaactaatatcgacaagtggtgcatcaacccacaacacgggataaggcgtgtcgcgactgtagcctgtccgttgaatgccaacaaactgcacgagttgcactaaatcatcaattcggtgccaagtcggtaagtaatcgaccatatcgccaccgatgatgaaataaaaatccgtattgggatattgtttctttaacgccacaatcgtgtcatacgtataactgacaccaccgcgttcaatttcagccattgataattcaaaaagtggattatcggcaatcgcccgtttgaccatttcaacgcgatgtttggcgggtaacgtttttttggtatcgacatgtggcggggtcgcatccggcatgaataaaactttatccaaacctaattgcgtccccacttgttcagccatgatgagatggcctaaatgtggtgggttaaaagtgccacccatgataccgacctgttgtcgttgtttatcttcgacaactaagacagacggttttgactctgatacaccgtgcactttttttaatgttgcattttgcatctcatcaccgccttattaacgtccgagcttagtaacaatcgttgaaattttttggtatttttctttacgtgatgccttataaatgaccaatgtccggccaattttttgggcaatttcaatccgattatcatgttgcttcaagaagttggctaattcatcaaccgttacctctgttgtttgcaataaattaatcttgattaattctcgtttttcgatagcttcttcgatttgttcgaaataagcttctgacaaaccattcttacctaattggaataatggttttgttgtttgcgctaatcctctaagatagtgcttttgtttacctgttaacacgcgcgttactcccttcgctaacctaaataagtgcttttctgatcatcactgaaacgccttttggtgcgtaccctgcgacaaccacattttctggtaatgtaatccagcctaaaccggcgaagactaaatcacttttttcttttgttgaaaattcataacgttgtaagtctggaaaatccgctaagtcttctggatgaggtggctgtaataaatcacctaactgtctaacatagaaattatccgcattttctaattttgttctgtggatgtaaagttcattatcaaagtaaccaacaaaaccgtgacgaggcccttgaagataatcaaaacgtgccaagccgcctaaaaatagcgtttgttgttcatttaattgataaactttaggcttgatttgcttttgtggggcaatcaaacgaagatccttatcatgtaagtaatgcgccatttgttgcgcgtgaataatccctggtgtatcaattaaagcatgatcatcttcatataatggaatatcgatccgatccaacgttgttcctgggaattgtgacgttgtaatcacgtcgctgtccaaaatcccagtttgtttgatgatgcggttaattagcgttgatttaccaacgttagttaccccaaccacgtatacgtcgcgaccttttcgttcccgttcgataactgctagtaagtcatcgactgagttcccttttttagcgctgaccaacatggtttcaattggatgtaagccatgttccttggcttctttttgaatccagttgatgacgcggttaggattaagggctgttggtaagatatcgaccttattgccgaccaagattactgggttatcaccgatgaaacggtgtaatccgggaatcaagctcccgttaaagtcaaagatatccacaacgttgacgattaaagcatcactatcaccgatttggttgagtaacgctaaaaaatcatcatcgtttaacttgatatcactgatttcattataatggcgcaatctgaaacagcgttggcaataaagctgacccgtttccaatccttttttaagggcagaattaggggtatagcctagtgcttccttatcagtcgtttgaatctgagcaccgcaaccaatacaaaatagtgcttcttcagtctgttgttgttcttcagtcatttaaatcctcccgccaagttaaatctgcgtgtttttttagtagttgttgcataatatatttttcaaaaaagcgattaatagaagtattccaagcgtcactatcaataattggtttcactaagattgtccggacaccggcaatattgcctgcgtgcatatcggtaatcaattgatccccaaccatcaccacttcgtgacgtgataaaccgagttgcttcttagctttcacaatcccagtcgccaatggcttattagctctggcgataaaaggtaattgtaattcggccaacgcgtgttggacccgttgttgattattatttgaaaccaccatgaccgtgatcccagcggcttgcatttgtgctaaccattctttgagttgcggcgtgccgtttgggttattccaagcaattaaggtgttatcaagatccgtcaaaacggctttaatgccttgtgctttgagttgttctggtgttaagtcatagattgcattaaccatccaagttggcttaaaattctttagcatgcatttgtctcctttaatctagtcactgactaattataggttatttagtaataaattgcacctttacgaggttaattatttgcccattctaattgcttttcaattttctcaacactttcttcacaatctaagtcaaactaatcgacatttaagcgcttttctggtacgtttaaagaaattgagaggatgtgttgttatggaaaaatttgggtttaatcattttggcggaccggatgtttttgaaacattgaatcaatcgcaaccagtgccaaaggcaaatcaagtcttgattaaagtactcgcatttgggcttaacccttacgatgttgcccttagaaccggttcacaacaaacagtgcgtcctttaccaatgccaatcgtccctgggacagatgtggttggtgaaattgtaatgcttggcgcagacgttaccgattatcgtattggtgaactagttattaatcatcgtccactcggcggttatagcgaattcgtcacagcttcaaccaacaaaatcattcgcaaacctgtcagcctcagcatcgctgaagctgctggtctcgcaagtgctggtattaccgcttataacacgttaatgcactttacgaactttaaacatggcgatacaatcgctatcatgggcgctagcggggctgttgggagtttactcactcaactcagcctagctgctcatttaaacgtcattgcaattgcacacagttcaaaccttgattatttacgatcatttggcgttcaagaaacaatcgcctatgaccaatcaggcgatttaagtcactttaaacaaacggccaagattgctgtcaacctcagccgcgatccaaaatcaactgaattattgaatgaacttgtccaaccagatggtttctttgcaagtacaacaatcatgccaagtgaagcagaacaaatggctggtgtcacttaccaatctgtctaccctcgccgtgactatcctgatttaacagcccttcaagatttaagtgaacttattgatcaaggcctattacacgtcacagtccttgaagaattacctttcacacttgaaggcgtcatcaaaggccatcaacttttagaaagtcaccatgcaccaggtaaaatcatcgtttcccgttaaaaataatgcaatttataaagaaagagtctcgaacaaaacgaagttttgtcccagactcttttttggtcttattaattatttgtttaatgcagctttagcagcttcaacaactgatgtgaatgcagcagcatcgttaacagctaagtcagctaacatcttacggttcatgtcgatttcagcgactcttaaaccgtgcattaattggctgtatgacatatcgttcatacgagcagcagcgttgatacgagcaatccataacttacggaagtcacgtttacgttgacgacgatcacggaatgcgtaacggtatgaaaccattacttgagtatttgctgatttgaataataaatgtttagcgccgcgataacccttggctaattttaaaatctttttacgacgtttgcgcgtcactgttccacctttaacacgtggcataagaatttcctccttgaataacaaacaacgtcaaagcgttgttgtagtgatctaatttttacttgaatccgaaaatgctatggcttatttaaggcctgataacatttgacggatacgtctcatatcgctatttgaaaccattccagattttcttaattgacgacgttgtttcttagtcttaccgtggaaacggtgacttgtgtaggcgtggctgcgttttaggccgccattacctgtacgtttaaaacgttttgctgaagcacggtgtgtcttaaattttggcatgatatttcctcctaataaatcagaaacagatttttatttttggtccttaagcggttctaacattaagaacatgctacggccatccattttaggacgtgctgtaactttagcgatgtcctctgtttctttagcaagtctttctaatacacgttgaccaatttctttatgcgtaattgctcggcccttgaaacgaatagaagctttcactttatcgcccttgccaaggaacttacgtgcattgttcaacttagtattaaagtcattttgttcaattgtgggactaagacgaacctctttgaggctaatggttttctgcttcttacgagcatcacgttgtttcttttgaagctcgaaacggtacttaccatagtccataatacgagcaacgggtggttttgcgtttggtgaaaccaagacaacatccatattagcttgttcagctaatgcaattgcatcctgtgtactcttgataccaagttgttcgccatcttgagcaatcaaacgtaattctcgtgcacgaataccatcgttaaccatcaaatcttttgctatgactcttcacctccataaaatttagagagaaaatgcagctaagcaccaaaaaaacggccccttcaacagaaaggcccgctattcgataacttaattcgtccgaattagaaactatcagcccagagacatcaagtgtctactaaggcgagaagcgggaacttctgctttatttctcaacgaaaataagtatactcggtttaagttttaaagtcaaggtaatcccaactgattttcagaaattaattaccatagtgattatcgattaattgtgttgctttcacttcatcaatattatgcgtaccagcaagttgcataacgagttctaattccttttgtaaatattcaaagacgttcttaacaccgatactgccacctaatgctaaaccatagattacaggccggccaattgcaacaatgtcagctccttctgctaaagccttaaagacatgttggccacgacgaaccccactatcaaagacgattggcacccgtttgttaacagcttttgcgaccacgtgtaatgagtcaaaggctgcagggccaccatctaattgacgaccgccgtgatttgaaacccaaatacctttagcaccggcttgaagggcaatttcaacatcttcagcagtttggattcctttaacgaagactggtaaatgtgtgtattcggaaataaatgcaacatccttaggattcaaacgttgcttagctgatttgtaaacagcatccattgtttggcccacacctgtttgataggcttcaacaattggcaaaccaactgggaaagtaaaatgattgcgcttatctgtttcacgattaccaccaactgtcgcatcagccgttaagacaattgctttcacattatgagacattgcttcgtctaatattttgcggttgatatcattatctttgctcatatagagttggaaccattgtggtgcgccatcagctgctgttgccatatcatcgatacttgctgaggcaaatgaactcatcgttaaaagtgagccatattccgccacccctttagcagttgccacttcgccttgcgtattaactaacttatgtgcggcaacgggtgccatgatgattggtgctgttaaatgatccccaaaaatttcggttgatgtatctggattttcaatatcttgtaagacgcgtggtgcgatatatttatgattaaatgctgtgatattttcattaatggtatagaggtcacctgcaccactatagatatacccaaaaccgcccttagggacaactttaccagcggcttcctctaattcatagagattgataatatccaatgctttttctgcagaacctgccatatatttttcagttgccataataaaacccccgttaattatcaattatgaaatcgtttacaactattattataccgcttttttaattgtgcacaactaaaagacgtaaaaaaaggcgttaaatcaaaataaattgatttaacgcctttttaaggatgctaatcctcagaagctacccgctttgaacgcactcttttttgaaacgtgcttttacaacttgattcctgcgctttgcgtcacctatcaaataagcggtaaataccgcttattcgctaggctgtgcaaatgctcagaatcaatcagttgtaacgcactctttatagattaatcttctttgtgtgttgtttgccgtctcggctatagttaccaacttctgctacgattgcgttgataaacatgtctgaggcttcttcaaccgcattttcttcaccgtatttacggacagaaactgttgcttgtgcaagttcttgatccccaacaactaatgtatatggaatcttgcttgtttgggcttcacgaatcttataacccattttttcattacgatcatcgatccgaacacgtaaaccgcgtttgatcatttcatctttgatgtttttagcgtaatcatagtgaagatcgttcttaactggaatgataacagcttgtgttggtgctaaccatgttgggaaagcgcccttgtagatttctgttaagtaagctgtgaaacgttccattgttgacactaaaccacggtgaatcataactggacgatgcatttcgccatcttcaccaacatagtgtaggtcaaaacgttctggcaacatgaagtctaattggattgttgaaagtgtttcttcattccccatagccgtctttgtttgaacgtctaatttaggaccgtagaaggcagcttcgccttcagcttcgacatagtctaagccaagatcatccatagcgcccttcaacattgcttgtgctttgttccacatttcatcatcgtcgaaatatttttctgtgttagcaggatcgcgataacttagacggaatgtgtaatcattgatgttaaagtcagcataaacatcgatcattagccctaagattgatttaaattcatcttgaatttgatcaggacgaacgaatgtgtgaccatcatttaaagtcatttcacggacacgttgtaagcccgaaagtgcacctgatttttcataacggtgcatcataccaagttcagcaatccgaattggtaattcacggtatgagcgtgggtgatgtttgtaaacttggatatgtgatgggcagttcattggccgtaattcaagcatttcgccatcgcccatgtccattggtgggaacatgtcttcacgatagtgatcccagtgacctgattgtttgtacaagtctaagttagccaagattggtgtgtaaacatgttcgtaaccattagcaacttctttgtcaatgatgtaacgttcaattgaacgacgaattgtagcaccatttggtaaccagtaaggaaggcctgcgccaaccttaggatcaacgaagaataagtctaattgattaccgataacacggtgatcgcgttccttagcttcttgacgacgtttcaaatcagcatcaagttcttcttgtttaggataagctgtcccgtaaatccgttgtaacatttggttacttgatttaccttgccaataagcaccagcaactgataataattcgaagaatttaacgtcactgactttacctaacattggtgctaagctaaagtctgagtagtcacctaattggtaaactaaaacttggtcagcttcaacttcgtctaataaagcaagtttataagtttggccggcaaataatttcttagcgtcatcttttgaaacactgacacgtgaaattgcttcacctgattggattaatttagccatttctgttttgatttctggtaaatctgttacagcaacttggccagcttcattatctgtatcgtaatagaaaccatcttcggttgccattacttcaccaaattgcatttctggatagtgttgacttaaagtagcagctaatacgaaagctgcagtatgccaagtggcagttaggttaaccgcttgatcatctttagtgatgatttcgattgccccgtcttccaaaagtggttgttgtaaatcaaccacttcaccgttaaattttccggcgattgccttttttgccaagctcgtactgattgattttgcaacgtctagtaaacttgttgcttgctcaaatgttttttgagcaccatctggaaaagttaattgaatttctgccatgcttgaacactccttcttatttttgtaatcaacaataaaaaaagtccctgagacgcatacaaatatgcacctcagggacgaattgatttcgcggttccacccagattgagaatcaaatggtgattctccaactttaagcgtctttaacggaaacgacccgactgacttaagcctctagaaagtggtcaattaaatgtccttatgaaaaactttcagttatgtttttctccctgatcaatattgccatttaaaaggtatctttcatcgttgattgactctattaaaacacttaatctgactttacgcaagtattaatttgattgcaaacgtctattttgaccactgacttcaacctcacgggctaaataacgcacgcgttgcataattcgaccagccttcaccggttcttcatcaccgcgttggctagttgttaaatgtttctccaattcgttcatcgtaaaattagagctgaagaaagtcgctagttgttcttgcatccggtattgcaaaataatgcctaatacttcatcccgaacccaagcactcaaggcatccgcaccgatatcatcaatcattaaaattggtgcttttttgatttggttgaccttttcgaggacgttattttggccaatcgcatttttcatctcaactgcaaaggttgggaaatggatcaacgtcgtttcaaagccttgtagtgctaattcattagcgattgcacccagtagataagtcttaccaacaccaaactgcccgcttaaatataagccttgatgaaaatcagtgggtgcttgccgataagcttcgacaaacttcaacgcttcgattaacggcacttggcgctcactggcatcatattgtgcgagactcgcttcgacgatgtccttaggcatgttaatcgacttcacacgggccttcagttcggcttgtgcgcgtttttgaactagatccgccgttggttcataactaacatcgataaagtggttactcaacaccaacttaggcgcatagcctggtgccaacgttgtttcaccgtttaaaattttctttttttcattgacgtattcatagattttagccgcactgcgcgccactgtttcttgtgatagggcggcctgattagcctgaataaaggcctgcacatcaggatcttgcaaggcttcttcaaccaatttattaaagcgttgattcaggcgttgccggttcatatagtcggttaaatctttgcccatattttccattatgattcccgcccttcacggattttcttgagtaattgatcaatttcttgctgatccgccttacttgatgtggtttgtggcgcttgataatcagacttggcccacttcggtacagtttcttgcttggtcttggcttgatagcgcggttgtcgtttagtttgtttcgtttcttgtttggtttggaaatcacggatttgtaaaatggcgtcagctggcgtcttaaccccttgttgcgcccattggttggcgattcgatctaacaaagcttgtgttaggccctcatactggctaataatataaaccactaaaatatttaaaacatcgttgttaaagatatagcgattttgtaagtcacgtaatgcgcgaatttcatttttcgccacaaagccatgatttttttgcttaaggtattccaaataatcaactggtaaatactgctgactttcggttaaccactgcatttctttttcattaaagccggctttttgccattctttttgtagcgtctcaagcggttttttagccggttgttcactgttattttgaacgctatgtcggcgcgtataattattcaaaacgttttgttctaacgcatccatattgacccgactgtcggcaacatccatggtgaggccgattaagcgtcccaattccatttcgtctaatccgtaaaaataatgcaaattaaataatcgttgctcattacgtaaaatttcatccgtatcgatttgattctgtgcaaccacttcttgtaataaagcccaatcaaaagtgcgcaactcaactgacgtgaaacttggtttttgcgcctttttttgttgatacgtactttgtgcctcagcaactgccgtaggggccgttgttaaatgatcattttgaacgtggaagaccgtcaagaagttcttcgtgacctcttcgtattccttagagcgcactggttgtagtttaaaatgctctctcaattcaacaaaccgcttctcaccgactgattcgtataaaatgacactcaacaaatcatcattgaagaaaatatgtggctgcattggtgcgtataattcatacaccagattgcggcccgtattgttattcttctgataagtccgcattaaacctaacgcttctaacttattgcgcgcgtcataaaaagccggcaaatcaacccctagtaaattcaacaaggtcgcatgcgtttggaaagtcgtttgactcttggcctgtgttgattggctccataacaaaagatagagactgtacgcgacagcccccatcagtggttggtataaataggtgacgactgtttgatcaaaatcgctcaaatagttagcttttgtcaccataaacccatctttaggacttaaataatcaaatgcatctgacatccgctaactcctttcgactaatcttggtctttagccttttcttttttcatcatttcttgcaattccgccataaaaacattcatgtctttaaattgacggtagacactagcaaaacgaatgtaagcaatctcgtcgacacctggtaaaacggccatgacgtattcgccgacagcttgtgacgacacttcgttttcgcctaatgccctgattttattttcaacttcatcaacaatttcagtcatttgttccatcgtaacaggtcgcttttcggcagcccggattaaaccacgtaataatttatcgcggttaaactcttcacgggtcccatttttcttaatgactaataacggtgtttgctccaccctttcaaaagttgtaaaccggaattgacaattttcgcattcgcgacgacgccgaataacgcgtccttcatctgttggtcgactatcaattacccgtgaactattttgatggcaatgtggacatagcataaagacaccttcttatcttttaatttaaggaatattaattgtattttactattctaaacagacagtataacaatattataacatgacatgcaacagagtgcctatcgcaccgggttacttttgagcatttactgagtggtgtgaataagcgacacagtcgattgttcgcacaacgtggtaaagcacaaaaagttgatgcgagaggcacgttttaaccagcgtgcgttaccaaccgggttgattctgaggattagcagcgttaggcgaataaccgatgcaatcggttgtttgactgacatcgctaaccacaggaatcaggttggtagtccacgtttcagagtactatcgcaccaggttacttttgcgcatttactgcgtggtacaaataggtcaaaaaaggagctgggacaaaagtaattttgtcttcagctccttttcggtatccgaacattggtggtataaacgtgttctataagtcatatccttctgtgttaatcctcaggacatacccgacttatggcgcacgccttccaaaactgtctttaattggtcttccaattgagccagtgaaccttgattatcaatcacgaagtctgctctgtcccgtttttcaaccaatgatgcttgactgttaatccgtttcaaagcatcttcgcgacttaattggttccgcgccattaatcgcgctaattgtttttcaaccggcaaataaacgactaacaccccgtcgcaaaccgtttcgtagtgctgttcatataacaacggtaagtccaaaacaactagcggtacttggtgcgctttggcctgaaccatctcggtcataatcgtcttccgaatgaccggtgctgtaatcgcgttgagttgcgctaatgcggcttgattgccaaagaccaatttacccaaagctgcccgatcgacctgaccatcttgtacaagctgcttcccaaaagtggcttgaatttgtgcttgaacgctttgattattcgccaacacttggtgtgcgatttgatccccatcaataataggcaacccttgttgggccagcatttgcgaaactgttgttttaccggtagcaataccaccagttaagcctaggaaataagtcattattttgcatcccttttaatctgacactttggacaaaaatgcgtcccccgttgtgccactttaatcttctcgattggtgtcccacatcgttcgcaaggtaccccttttttgccgtaaacatgcagcatttcttggaaggcgccagcatgaccggtcgcgttcaagaatgtgttaaccgtcgtcccaccatgattaatcgctagttctaattcggcgataatctcatcgtggaggcgatccgtttcagtacgcgtcaagacattggctggcgtttctggatgaatatggctcaaccacaacgtttcatcgacataaatattgcctagaccggtcacaaccttttgatctaataacaatggcttaatagctttgtggtgcttttgcaaccgttgatagaagcctgcctttaaaaaggtcgtcggtgttggttctggccctaggtccttcaagcccgctaccgtattttcctgaccggtttcaatcaactgcattcggccaaacttccgcgtgtctaagtagcgcatttgttgaccatccgtgaattcaaaaatcacgtgcgtatgtttggaaatcggtgcctccttggcgaccacttcatacttaccttccattcgcagatggctgacaacagttaactgttctccaaaacgaatcagtaaatatttcccccgccgatcaacagctgtaatctgttggcccactaatccagcagtaaagacttcatctggattaacaatgattttcgaccagcgaatatcgattgctgaaacagttttaccaaccgctagggtttcaagtccccggcggacattttcgacttctggtaattcaggcattttccgtcaccttatttcttaatatcgtaccaagttgggccaaaaccactttcgaccttcaatggcaccgctaacttaacggccgaatccatcacacttgggactaatttttgtaagattggtatttcttcagttggtgcttcaaaaatcaattcatcatgaacttgtaataacattctggcttgcaagttcgccttcttcaattcttgttgcattaaaatcatcgccaccttgataatatccgcagcactaccttgaattggcgtattcatcgctgtccgttctgcaaaagaacggaggttaaagttcttagcgtgaatatctggtaaataacgacgacggtggaaaagcgtttcgacatagccttcttcacgcgcttttttaacaatatcaaccatgaattgttgaacacctggatattgttcgaaataagcgtcgataaagcgtttggcttcttgccgcgaaatgccgatattttgagataagccataatcgctaatcccgtaaacaatcccaaaattcgtagctttagcttggcgccgcatatctggtgtcacttgatcggcaatgtttaagccaaagatcttcatcgctgtatttgcatgaatatcccggtcttctttaaaggcttcttgcatgttggcatcccctgagatgtgtgccaatacccgtaattcgatttgcgagtaatcagaagcaaacatttgccagtctgggtgacttgggacaaaggcttggcgaatcttgcggccttctgctaaacgaactggaatgttttgtaggttaggatcaaccgacgataaacggccagtttgcgtcaaggtttgtaagtaacgcgtatggactttattatcttgatggattgatttcaataacccttcgacatacgttgattgaatcttggcaatttgacgataatccaaaattgtttggacaattggtgcatccttccgtaattgttcaagcacatcgacagcggttgagtagcccgtctttgtcttcttaatgactggtaagcccattttttcaaataaaatgacgcccagttgcttaggtgagttaatgttgaaggtttcgccagcttcagcgtaaactttttcttccaaaatcttcaaggtctggctgaattccgagcccatttgttgcaggcgactagcatcgacccgaatccctgttatttccatttgcgccaatacgagggccaatggtaattccatatccgtaaagagatcgaattgttgatgttccttcaattgttcttcaagttgtggatgtaaatgataaatggctgccgctttttgaaccagatgttgatataacaaagcaggttcagttggaacagcccgtttagcacctttcccataaacggcctcgtctgtttgcacattttgatattggtgtaaattagcgaccgtccctaaatcgttgctgttattcgtcgtattcaataaataagatgctaataataaatcaaaattaacgcccgctaaatgaacacctaatcgattagctgcgacttgcgtccgtttgacatcgaagactgccttaggatgactcgcatcttccaaccaatccttcaatactggttcagctagtagtgcaacatcatcactgacataccaatgatctggtgcgccaatataaaaaccaattaaatcggctatgtggtaattatcggttaacatttcaatcccgaaggcaaccggtgttttaatcgcttgaacggtttctaaattatccaacgtcaaaacagtatattgatagttttccgccggttcaactgcttctggtgtcacgtttaattgctttaaaaagttttgaaagttcatctcttgataaaaagcaatcaacgtttcgatgttgggcccttcgtacgtgatgtccgctaacgtcgtttcgatcggtgcatcccgcaaaattgtcgccaattttttgctcataaaggcttgatcacgatcttcaatcagatgttccttcatcttactctttttcattgcatcgacattttcgtagaccccttcgatgctcccaaattccgttaagagtttcagcgccgtcttttcgccgacctttgtgacacccggataattatcagaggtatcacccatcaaaccttttaagtctacgatttgactaggtgctaagcctaatttttcttgtacatgttccggtgtgtaggcttctgtatcgttgacacctttgactgtgatattaacggtcgttttatccgtcgttagctgcgttaaatcccgatcacccgtcacaatattgacgacaaagccgtcttgttctgcttggctcgccaacgtcccaataatgtcatcggcctcatagttggctaattcagccgtctgaataccataagcatgcaataattccttgatataaggaaactgttccgttaattctggtggcgtcttagaacgaccgcccttatagtcggcaaactgtgccgttctaaaagtcgttttgcccgcatcaaaagccactaagacgtgtgttggttcaaaccgtttcaaaataatatctagcatgtttttaaacgcataaatggcattggtatgtaacccatcttgattggtaaaactatctaacacttggtgcatcgcgtaaaacgcccgaaacgctacactgttaccatcaattaataataaacttttttgagaacccatcgtgttcctcctaaattcgtaaagtcgcttcctctattctaacaaagaaaagcaagactcgatactgatttgaccgtacaaaaaaaggaatctggtaaaaatccttaccaagattcctttcaattattttgcgtctggtcgattaaggttcattgataccattcgttcaaagatttctttactttgaccgatagtagcatccactttatccttacccacttcatttttgagatcattataaagatctaaatagtaataaagtaagtgatgataaacttgtaatcctttttcagttaaatgaacacggcgaatacgttgatctttttcgtctgattgttcagcgataaaggccatcttccgtaacgaacgacattggcgtgaaatggcagagcgactaacttgcatcttatctgctaaagcactattagttgtttcgttattgttattcttaatctcgtgcatcactaagaattgatcaaatgataatccatatttttgactttctcggttcatcgattcgctcaaattattgatgagccaacgatataatcctgcgaattccataaaatcggaccatgaatcaccgattaggtcggacttattagttgcatccatgtttttcctcctatatgtcactgcctcgccactcatccataactaagacaacttaccacaatctgttcacttactttaaataaataaaaataaagtaatcaaaacataatttattcatcttatactatgaattcagttgattaagcaacattcctttaattaaacttcaactcactatgacttaaagcgttataaacagtttatagtattaaaaactatatttcaaccaatttccctcaacttaataaaaagattagtgtcgttgactatttagagcattatccactttaatatttagcaacaatatcaatatttttataattattaataattgcgtcaaaaaatcatatctgatttgatatgatttaagccagttccttgttcaatagcgggttaataaaccatactagttatcttctaacaactaaatataatattaatatttttattttaaccatcaataactaactagacttcattaggaagcgtcacagtaaaagcaagaacctgatgggtcaaatcccacaaattaactgtaatcgattgggggataaggccatcagtatcatagtgacagctagcttcatatttgaattcggtttcagcttgctttttgctcaaaataattcgtgtggctaattgttcaaaatcgtctaacgaataatgcgtccctactggttcccctggcacttgaacattatttaggaccaagcgataatggttattttgataaatgctatacaattgatttacccgtgcttgattactcatcatcaagtaattcatttgggggcgatcaccatgattcaaatgtgctgtaccagtaaataataacccatcaatattatcgccttctgaaagcgtaaaacgaaaaggcaacaaatgtgtgcgatgatacaaattaattttttgtccagctacctttacatagtcgtggctcactaaatcataacctggcgtgtaagcccgtttacgctgttcatcactgcgcttaacgataccggtttgaaccattgcttgccgagcccttaacatgccggtcgtcagaagcgcaatggccccaataggtcgtccttgtggcatttcagcgaccaatacatcaccaaggacaccaggtttatctaattgattcatggtctgttcaaaatgagctgctgttatgtagcgatacttgacttgcgcgctatccaaaagtgcttggttctggctagtatcatccacttcatcctggccactgtgatggcgtacaaattggtatagtgcataacctaaccaaatgacggccgcagcctccattaagggttgctgccaccatttcccaaggttatacaaaagcagcattcctaaatattttttcatcaactatccttttaaacgagattataagccttaaaataaatcataatgaagcatataccagtttatagtattaaagaacatgtttcaacagacatattattaaattaagtaaaattttgctaaatagactattaatgagctgaaatgccctttttttactaaaaaagcggccctaactagggctgctttaaatttatttaataatcgtaattgcaatatgacgtcgtccccaactgacgcattgggcaacacttgggaagtgaacatcaataatgtggcccttaatggcaccacccgtatcacctgcaattgcataaccatatcctggcaccaaaacaagcgaatttaacggaataacttttggatcaacagcaatacaattagggtttttcaccaaatcaatgcccgttgcgccgtagcgacttaagcctggttctgccgttgaataagccgtcgcttgcacttcaattgtctgtccgggctttcctttggcagcagcagctagcgcggcttgttgttgattattgactgctgataatttttggctagcagctttagcggcagcctcatttttcgccttagcagcggctttagcttgttcttcagcttctcgtttttgttcttcaatcttctttttactaatatcagcaagttgtttttgactctggctcaagtcttttttcatctgatcgacttgcttttgtaaatcagccgtttgctggtctaaatcctttttttgtttgtctaaagcggccttactttcttctaagtgtttttgaattgtcaccattttctgataactagttgctaaatcagtcatattttgattatccgcatcttgtagaatcgtcaaagtgtagacgcgactaaatagatcactcaatgaatcagccgataataaagtatttaagacatcccgattatcttctgatttttgtaatgcctgcaagtgggccttggcataatcttttcgttccgccaattcctttttttgagccgctaaaatcgtttcggccttattaatatgttcttcattttctgtaattttcgtttttaattgatcaacttcttgatatttagtattcactttggttaacgtgctttgaattttaccgttgatcgtatcgatacttttttgtgtttgatcttcttgttgttttaattcactaagactggcagcgctgactggtcctgctgtcgtcacaataatcatcagccctgtcagaatcattaaaccgattttcttgaattgcatcttgcttaagcccccctacgttatcgctattccagattaattatacagaataacgatggttaatgctattacgttttagtgttaactattacaaatttctcgtcaagaaaataaaggtgtttgtttagttcacttcaaccccctatagtaatgattaaagcgtaatccttcaagtttttttacaacactaactaaaaaagaggtcggacaatatcgtccgacctcttttaattagcgttttcgtagtgctcttgccatttcacgatcttgttccttacgcttgagtgtttctcgtttatcgtattcccgtttcccttcaccaacgccgattaagaccttagcaaaaccgtgttttaaataaacacgtaacggaacaattgtaatccctttgtccttggtcaaagcaccaattttagcaatttcctttttgtgtaacaataatttccggttacgcaatggatcatggttaaattggttgccttgttcataaggactgatatggacattttctagataagcttcgcccctacgaacacgtgcaaagccatcacgcaaactaattttccccttacgaaccgatttaatctcggtcccagttaaaactaaccctgcttcaaatgtctctaggatattgtaatcatgcccagcttttttgttttgtgcaatcaaattagctggtttttgtggatgtttctttgccattcaatcacctactttttaaaagtacgtttttgtgagtcctttttagccactggtcgtcttggatgactgtttttcttttggtcaccacgtcgttgaccgcctttttcatggtctcttgggcgagttgggcgcttaggtcttgcttctatcttactcaaaatttcagcagaagccaagggaacttcctcgcttgctaataattcgaagtctacagaatgtgcatctaagtcaacattagcgactttaacccgtactggttggccaattcggaacattttatgtgttctttcgcccactaaagccaattgactttcaacaaagctatagtaatcatctttcatttgagagatgtgtacaaggccttcaaccgtacttggtaaggcgataaacatcccgaagcttgtcacggaactaataacagcatcgtattcattaccaaccttatcaagcatgtattcagctttcttaagatcaacaacttcacgttccgtatcaattgagcgtcgttcctcaagtgatgtttgttcagcgattggttgtaacttaggtgcccatttttctttttcttcaatcgtcatgccgttagtagcatagttatgaatcaaacgatggaccattaaatcagggtaacgccgaattggtgatgtgaaatgcgtatagaattcagcagccaaaccaaagtgaccaagtgattcatctgaataatgtgcttgttgcatacttcttaataacattgttgtaataatgggttgttcaggttgaccttcaatttgcgtcaagacttcttgtaacatcataggtgttacttttttgcttgagccctgaacttgaatgccataagcggtgataaattcgaagaagttcttcatcttatcagcatctggtgtttcatgaatccggtataagaaaggtgcattagccgtactgtaatgttcggcaacagtttcattagcagccaacatgaatgattcgatcatgcgttctgaaagaccgcgttgacgtaattcgatatcgattgccttaccgttttcatcaacgatgattttagcttcgtcttcttcaaagtcgattgcgccacgattatgacgtttcttcaagaggatttcgtgtaattcagccattgtttcaaacattggcaccaaacgtgcgtattgatcacgtaagtcagcatcttgatccgtcaaaatcttattaacattgttataagtcattcgagcggttgatttgataacacttgggaaaatgttgtgatcgaccacgttcccatgttcgtcaatttccatttcacaagtcaaggccaatcgttcaacgtctgggttcaatgaacaaatcccgttagaaagacggaatggtaacattggaatcacgcgatcagttaagtaagtacttgtcccccgttcgagcgcttcagcatctaatggggaaccttcggtagcataataactaacgtcggcaatatgcacgcctaagtagaagtgaccattgtccaattgacggacattaacggcatcatcaaaatcttttgaatcgtcgccatcgatggttacaactggttggtcggttaaatctttacggccaaacttatctgtttctaaaacagtatctggaatggcttctgattgtagtcgaacttcttctgggaaatctgttttaatatcatgttggtaaacaattgataaaacatcaaccccaggatcgtttttattccctaagacttgtttggcaatcccgcgcatttggccaggggtatcgatacttgggtatgacgtaatatcgacttgtaccatatcgcctttttgagggtgtaaaccgttgtctgttaagtaaattaaatagctgcttaattttttagcatggctttgaatgtaaccaatcaagccggttttttctttttggatatctgaataaggcatgaattcgccgacgatttcttcgatgccccgcgtaatcactttagccactttcccttcaggcccgcggcggctgttttcttctgcttctttgatgatggccacttcaacagtatcaccattcattgcaaagtttgtgtttggtggggcgataaaaatatcgggatcacttggttctttatcaaccattgagacgaagccaaaaccccgatcgttagcgtggaaaaccccttcgactaagcgttggctagctggtaatctgaatttaccggcatcatccattaaaaggtgcttgtccccttctaattcggctaatactttcactaaatccttgaacccttgtgagccggccacaccggttcgttcactaatttctgatacgtttaattgttgcgtttcatctgctgcaaaaatggctaagatggcagctttcatttggtcaacttgtgtcaaatcaacacctcttccttatttcttataacgtttaataaatacttcaacatctgcttctaattggtggtgcgcccgatcaaccgtaatcacgtgaccggcattgtcataccagtgataatcaactggtgtttgttgtgcttctaagcgttgttttaatgctgatgcaccgttaggatcaatcacttgatcttgaccaccttgaccgataaagactggcttatcaccaatctggtctaaatcggcggtgactaacgcgctaaaatcagcgattgcttgtagttgttgtggtaattgttgcttaatcttagccaattgaacggcttgatcagcggccgttttttcggtaatctgataaaggcgttgcgcatagcccataaatagcggtgctagtttatcagttggtccttccagtactggcgcgctaaaaataccgccgcccaccaccgctggcatcgtttcgattgcgcgcatcgcgaacaacccacccaatgacaagccaaacacaaatagtggtttcttggcagcaacttgtaacttctgaatggcagccgttgtatccgcccaccaagcttgaacactaccttcttctaagatatcgagtggttcaaaagtggcgtgccccgtaaagtgcggtgcaagcacactgatttgctgtttctctaaaaaacggcccatcatatgaacatcattagcacttcctgtgtaagcgtgcaatagcaccacgccaactgagccactatcataatagtaaggttgtggtaaccgatactgcattcaaacccgcctccagtacttgaccgatttaattcatttaaaaaggtctcctgctatttgaacaggagaccgcatcaacgttcttattagaattcgatccgtcctacttgctttagtgtgatgataaataaactaatgcaattgcaaagacgaagaataaagcccctaaaacgacggtcactttctgcatgaaagcttcaaagccacgggccttttgcttaccaaataaatcaccagagccacctgataatgcgctcaaagcatcctgttgtttacttggttgcatcatgactgcgatcacaatcaagattgaatcgattaataataagttcaggataagattttccaacctaactccctacctttctatctacactgtcttttaatactttagcataaaaagtagttaatcaccacttttttatcaattatttcacgagattctcatccgctttttttaaggtttgggcagcggcttcaatctgtcgccgcacggttgctcgtaagtgatgatcggttaaaatgaccaaggtgtcacccgcgcgaatcagcgtatcaccatgcggaatcaattccgcttcgccgcgccgcacggcaattaataaacatgtttccggccaagcaacatcgcggacttgatgatcttccaatggtgccccggcaaaaatcggcacttccaaacgatctttgaattgtgccatatcggttttaggttggccaattaggcgttgtaataacgacgcataaatcggtgcgccacccatcaaatcaaccacgacatacgcgactaacgataaaatcgccaacggcattaaatgggtgagtgtcccgaccatttcggttaccaataaaatcgccgtaaacggtgctttcccgatgccggcaaaataaccacccatcgcaaaaataattagattagggacataaaccggtgctaaccagcccaattggaccatcactaagccatagacggccccaattagtgcgcccagtgacaagatgggcaagaagatcccccctggcaagccagaaccatacgaaatcattgagaaaacaaaccgcaaaactagtaacaatgccaccgtggttaaagttggcacttgttggcctaattgtgtgatcaaaccattcccgccacctaagaccgttggccaaaagtaaccgatgggcaatacaagcactaacggcaataagccccaataatatttaggaactggcaatcgcttataaaactgcggtaaccaaagcaacgttttttgatagacatagcccaacaacccgagcacaatccctaaaagaatcagatgccaatactgattaatcggtaaattatgcgtatacgtaatgtgcaacgtgggcgttaatccgaaaaaattcaatgagataaagttggccccgattgcactggtcaatgcggttagccaaacaagtggcgaaaaattatgatagatttcttccaatacgaaaaaggttccagcaattggtgcgttaaaagcggccgataaaccagccgccgccccaccagcgattaaaatgcggcgatcagcgccgtgatcgtctaagcggtccgctacgccttgaccgactgccgcccctaattgaattgaggggccctcgcgtcctaggaataagcctggcgcaatacttaaaataccaccaacaaatttgcgccaaagaatcgaccaccaagctagttcaaattcgccttctagttgcccttctacttggggaatccccgaaccactgatgttaggttcttttttcaatagctgcgccacaaccaagcctattagcaagttagcaccgattatccacaaccagttaagtggttgactatgcaagctttgatacaacttaatcgttagtgctaagcccttttcaatcgcaagtcgaaacaaactgactactaagcctgtcacacccccgactaataacccttttaaaataaaaacaaagcgggttttattaaagcggctggcacgtctgattcgtccgttttccaatagcgttcatcctccaataacttttcttttatcctattataagctataaaacccgcaatagcttaaacgattttattcacaaattccttaatttaggattgccatttgattaaatttcgattatattcaaagtatacttataaaaggaggttgctcttatgcaatctaaatcgaaacagcttcgttggtataatgttgcacttattgcctttgtagcggtttggggtcttggtaacgtggttaataactacgcacaacaaggtctctccgttatcacgtcctggattctgatcatgctcttatatttcgttccttacgcattaatcgttggtcaattaggttctacttttaaagatgctaacggtggtgtttcttcctggattaaagcaacgagtactaagcggctcgcttactacgctgcttggacttactgggttgttcacattccatatcttgcgcaaaagccacaagggattctcatagcgctcagctggcttttcaagggtaacgggaacttcgtcaatacgatttcatcaatggccgtttcggtcatctgtttggtccttttcttactcttcttatggctatcatcgcgcggaatcgcgaccttgaaccggattgggagtattgccggaaccgctatgtttgtgatgtcaattcttttcatcattctcgcagtttcagccccttttatgactaagggcgcccacattgcgacaccagatatgggcaatattaaaacatacattcctaagttcgatgttaactatttcacaaccatttcaatgttagtgttcgcggttggtggcgctgaaaagatttcaccttacgttaacaatactaaaaatgctgctaaagaattccctaaagggatgttagtcttagccggcatggtggccttttgtgccatcctaggctcatttgggatgggtatgttatttgattcaaaccatatcccaactgatttaatggctaacggtgcttacgaagccttccatcgtctcggtgctttctaccacgttggaccactcttcgttattctttacgccttagcaaatacactcgcacaaatctcagcgctagccttttcaattgacgccccacttaaaattttattgggcgacgctgatagcaacttcattcctaaaggtctttcaaaactcaacaaaaaaggtatcccaactaaaggttacatgttaactggggtcctcgttggtctcttgattatcgtgcctgccctagggattggtaacatgaacgaactttacaactggttattaaacttaaactcagttgttatgccacttcgttatctctgggtattcttagcttatatcctcttgaataaacaacttaaaaaatttacgtcagaatatcactttactaagaaccctaaaatcggcttaatcgtcggtagttggtgcttcttcttcaccgcctttgcttgtttgatgggcatgattcctaagctttcatacgctgctaacccttcaacatggtggttccaattaagcttaaacatcatcacaccaatcatcttcattgcgctaggtatgatcttaccagcaatcgcaagaagacaaaaagcatagaagtgcgattaaaggcggttaacttccgagcattagcctagtgtcgtgaataagcgacttcagtcgattgtttgcgatacgtagctaagcacaggaagttgcctttaagcgcacgttatcaactctaatcacaactcaaaacagccgcccatcataatatgggcggctgtttttattaacttaatcttctatttttaaatcgttgccatggtcgctctgtataaagccaaccgataatcccgataatgacaatattacgtaagatgacccacactaagactattttttcatggttggctaatagttcataaggttggcggctgaaaacgccattcatcccaaacaaccacgccaaatataatgtaccgataacaaccagcggctttttaaaaccagcaatttggaccaattggttcttattttcaagtgataagcgtttataaatccaagctccaccccataacaatagacaagttactacgaacaaaccaatgattaacccagtttgttgttggttacgatacaaccggtattgcccgttacccattgttaatagcttagtgagtaagccaccattactatcagagtgaatactatattgttcacttcctcgactcattacaaagcttcgtgtatcactcatactagtaatagcaaaagaaagtgaacaaataaaaccaagaccaccaatgattaatgttggtaacttaccaattagtaatccaattaaacaaccgattgtaaaaatccctaacatcaaaacaaggctgccaatctcacgttggattagcgtcgggatatttagctgaacatatgacgcgtcaatttttaacttcagaactgaatagtagataacatctcctatcaacagactacttaataatgttcctattccataacccaatttcgtccagtatagccgtcgtcgcgaactctctaaactaaacaagaacgtatcaaaattagtccgtcgatcattggcaaatgttaagagccctgcaccaaaaacaatcattactagcacgattatcgttggtgaataaatcataaagcctgcctcatgcgttggttcaaatacaggattagcttccaatctataagcctctaatgattgctttttgggatggcctttacgatcttcttgtagatataactttggatgttgcttaaaatctttaataaactgttccgaatgataatattgatcagatgattgccatttatcaacaacagtcatacttctcatcccttgcagcccaacaataatcacaaacaaaccgaccaagtacttccaatagcgtaattgcataattttcattaactgtttttgcatttttactgcctccacttctaaacgaagacttgatagtcttgttcgttaattaagtttgcttcgaaaacatcttccaatgtaatcggtagtgcttcgcataaaacagggtccaatgcggataactcctgtttaattttatctgtatagtctgggaaataaacaaccatcacgcgccctgaaacatttaataaccgccctttttcttttactagtgctggaatctcgttggtttttaataccagttgcaacttccgcgctgtttggcggagtgtttctaagcgataatcgtgactaattgtccgatcctttaaaatcagtgtctggtcaatcaagggttctaattctgctaaattatgtgatgtaatcagcagtgaaaattgttgttcaccaacttgatcgagcaatagccggatcacatttttacgaataatgacgtctaagccatcgaatggttcatccaacaaaatgtaacgcgcatgactactgatagctaaaataatattgaataagccccgcatcccttttgataattgccgataattttgtttgagtggtaagcgatactgcgctaataaagtagtcatctgattttcatcaaactgcgggtaggcttgttggtaaaagcggccaatctgtaataacgtcaaatttttgaaaaataagtgatcttcgtctaaataaaaaatttgggtccgcaagcgacgatcttcatcgattgaaacttgatcaatcaaaatctgaccaccatccaataaataatgaccggcaatactttttagcaatgtcgacttaccggcaccgttgcggccgatcaatcccaagattttccccggttcttgttcaaaactaatctcttctagaattgatttttgatcaattcgtttatgtaacttgttaattgtcagcatcttttggacccctttcaaattgtgcggttaaccattcacgcatctcagcctctgaaacgtttaaataaacagcttctaaaacgagttcttgtaattgcgccttcagttgggcgattttaacattatcccggtcggtcgcttggtgttcagcgatgtaagtgccccggcctttaaccgtcactataatgccttgcacttctaacaatttataggccttgcttaccgtgttcgggttcatcattaattgccgcgccatttctcgaaccgatggaatttgttcacccggttttaaaattccctgaaggacttgttccttaatcaataaaataatctgttcgtagtacggtttagcgcttgttttatcaatcatcatcgccttggcacctcctttaaattaatcactgtattacagtgtactattatacgtagtacactcttaaagtcaaccacaaaaaagacgctcaccaaaattattcgttttgatgagcgtctttttgttattcagattttatttttaaatgcgttgcaaaaaaagtcggtaatcgtcgtcattaaggtgggttgcactaaatggcgctctccttgacccgtcataaacgtcacgttttgcgcatacgattgcccttttatttgttgttcaaaatcagccatttggttataaggaatccgttcatcctcggtaccatgccaaaataaaacggggcgattcgcaagtgcattcggctgttgcgttaaatcataggctgttagccaactcgtcaacaagccaagatcagccggttgttgtaagccgtgctgccgaacattatcgcggactaagcgcgcataggtcaacggggctggcgagcccataatgcaagccgccactttaatttctggctgtttcgtcaataaagccgccgttgtcatgccacccattgagacaccacccacaccaattaaatcgtctttaatcaggtgcagttgctgccaataatcgatgattaaactaaattccgctagattggtctggatgctctgccaaaaagtccacgacggaatttctgatactggctgcagccgttcaccatgactaagcgcgtctggtaatacgacgcgcatcccagcttgcgctaatttacgcgcctgtgtcaggactagttccttagctgaacgccaaccatgataataaatgactaacggtaatggctggtggcgcatggtttcttcaacaacttctaataccggaatccccttaatctgccgctttaatacaagtgccatcccaaaatccccccttttgaaaagttcaccattactatagcgaattatgaaggaaaagtcgcgtgtggtgtatccaaaaagaggaccagacaaaattaatttgtctggccctctttaatcaccaacacccggttgctggtgattttgaaacgtgcttattggtcgcaacaacttccgcttagctacatcagtcaaatcaccaactccgttggtaattcgcctgcttaggctaatcctcagaagatatcaggcttactgcgcactcttttttattaaacgtgctttcattaacagctttttgcgctttgctacgtatcgcaaataatcggctgaatccgctcattaacgacactaggcaagtgctcaaaagctacccattaatgacgcactttacatttctttgggtgcttggacgcctaataggtctagggctgtttctaagacgatgctgacactcttcactaatgatagacgagcgtttctttggtcgtcgtcggccaaaatcttagagttagcatagtatttattaaatgcttttgctaaacgtaatgcgtatttagcgacgattgatggttcgtattctttgcttgcgcgtacaatcactgctgggaagttgcttaacatcttcaagacgtcccaagcgttatcatcagcaaccactaattgatcgtcgacaacgacttcttggttagcttttctcaagatactttgcgcacgtgcatttgtatattgcacgtaaggacctgtttccccttcaaaacgaaccacttcttctaagtcaaagtcgaagttgtctaaacgatcattcttcaaatcgtggaagataacagcgccaatcccaacttgtttagcaacttcttcacggttaggtaaatctgggttcttcgcttcaatttgagcgccagctaatttaacagcgtcgtttaaaacttcttctaacagaatcacgcgaccactacgagttgataatttcttaccaccttgtgtgattaaaccaaatggaatgtgatggatttcgtctgaccagtcgttacccatttcttttaaaacagccttcaattggttgaaatgttcccgttgttcgccacccacgacgtacaatgattgtacgaagttataagtgtcatgacggtacattgcagctgccaaatcacgtgtcatataaagtgtggcaccatctgattttttaatcaaagcagggtttaagttataagctgttaagtcaacgatttcagcaccgcgactttcttgtagtaagccttttgattcgattgcttctaccacggcatccatcttatcgttatagaaagcttcgccgttatatgaatcgaattcgacacccaacatgtcataaatcttttggaattccttcaatgattcacttctgaaccatgaccagagttgtgttgcttcttcatccccggcttctaacttccggaaccatgcgcgcgcttcgtcgtctaattctggatgttctacgtcttcttgatggaacttaacgtaatatttcaaaaggtttgtgatcgggtcttctttgacttcttcttcactcccccattttttgtaggccacgattaatttaccgaattgtgtgccccagtcacccaagtgattgattttgatggggttgaaaccaaccttcgtcaaaatcttagcaattgagtttccgataacagttgaacgtaaatgacccattgaaattggtttagcgatgttaggtgatgacatatcgattggcacattaccaccgtgacctaaatcactttcaccatatttagcagcttctgttaaaacggtcttcaagatttggtcgctaaaagcagccttgtctaagaagaagttgatgtagggaccgttggcaacgactttttcaaagccagcaacgtccatttgatcaactaaatcttgggcgatttgttgtggtgccttccgtaatgtcttcgctaagatgaatgttggaaatgcgtaatcacccaaatctgatgtcttaggtgtttcgatgagttgtgcgaccttgtctgctggtaaactgtcgcctaaaacgctagttaatgctgtgacaacttgttgtttaaaatccatgttaatagcctccttaaattttcgaacaaaaaaagtcccttccaaataaatgaaagagacgagaattcccgcggtaccactctgattgatcaatcgatccactcaatagtatgcaattgttcaaccaaaagtgcgccgcatcagcttgattatccggcttccaccaaccccggactcgctattaatcgctgctaacactattcttttgactgttctaacttgactcctagtatatagaagtcccgttaacatttcaaccccaattattcagctgctaaggcttcgattgggtctaatttagcggctttgcgtgatggggcgagcgctgcgagtaaactaatgaccacactaatgacaatcccgaaaatcacataaccactggtaattgccacgattggcatgtgcgtcaatggttgggcaatcacattaaccagcgcttgaccaccccaggctattaaagcccctagaacacttgagaaaagaccaatcaagaaagcttctgatacgaataagtggcgaatatcctttttacgtgcaccgatggcccgtaaaataccgatttctttcgtccgttctgaaacactgatgtaaaggacgacgataatcatgattgctgaaactaataatgaaattcccgcaatcccagctaagacgtagaaggccagcatgaggtacgtattgattgaatctaagattgcaccaacaccggtaatttggtaatctttttgcgttttaccatttaccttactgtcgtaagctttgattttattttgaaccgctttgacgttttgcgttttattcaccgtaacagcggcaaagttaggtgctaaatctaagttttgggcttgatacatcttctctaaagtcccataagtaatggcttcggtcccagaattgataatccctgaaaccttcacatcttgacgcatttgaactgggcgttgatccttgctaatcgcattgacgtatatcgttactgtccgaccaaccatcttcttgtaatttttcttatctaattttttggcagttgctttggttaaaagaacttcgttggtgcctggttttgtcccagttttaatatcttgaatccgttccgtcttgttaaaagtttggaacaattggattgtttcactcttcttttgatagtgaacttggaccccattggtatagtagcccttttcaacctttgtcacatctttaatcttgtcaaaacgtttaatatctttattggctaaattcccttgatcgccattttcaatttgtttttggctcacattccgggcaatttgaattgtattggggttcacttgggatgatacttgatcgttgatgtacccggtcaccccttggcctaagcccaacattaaaatcactgagaaaatcccgatggatgcaccaaaaatgattaacaagtttcgtttaatgtcatagcgcatatgttgcatcgccattttaaaagctgacatgaaactcaatgggctatttttcttgggtgctgattcacatggtgctggataagcatccttgaggcgcttatcataatcaatttgcccatcaaccatgtggacaacacgtgtgccgtaatccgcaacagcctgcgaatgcgtcacggcaataacgagtttcccatcttcggcaattttttgtaaaatcgccaagatttcagcagtattttgactatccaaggcaccggttggttcatcggcaatgatcacatcaggatcggcagctaatgcacgcgcgatagcgacccgttgtttttggccccccgatagttggtttggatgcttattgatatgttcctttaggccaacttgttctaataaggcggttgcctttgcaacccgttctttatgcgataaagcggtcatttcaagtggcaccatgacattttctaagttggttaaatgactgattaaattaaaactctggaagatgaagccaattgtctgactgcgataagcatcaaacttcttttcagaagcattcttcagtgattcgccatcaacaattaattcaccttcatattgatgatctaagccaccaataatgttcaataacgtcgatttaccgccaccagattcccctaggatcgacacaaattcgccccgatcaaatttaagattgatgccttttaaaactttaaacgcttctttattcacatgataggacttatgaatatctttgatctctaataatgtcaattgactacactcccactacttatagtaccctctgtttattccccagggctttgctcatgaatctactttaccaaaccgactttgacaaacaatcagtctaaagtcttaaaaatgacagcctgtcatttattattttttaactgttctttacgcaacttttcaagattgcatcattatatcattttgatggccaatcggacaaaaaaagaagccagaccatttcggcctagcttcttcaataattattcaactgttattcatgaagcgagtgacgggaatcggacccgcgacgcaagcttgggaagcttgagttttaccactaaactacactcgcattactcacttattgtagcataatctcctagatttgtgaatatttttttgaaaaaatgattcaatgacttaacaggcaccccttcggtaatgtatactaagactaataactcaaagattggagtcctattgatgaaagattctcaagaaacatcacaagaactttcggaatcatcggcttttcattgtccagcgtgccaagcctctattgattacggtatcaaacgctgtcccagctgtcagactgccatcttttatcgtgatatgtctgaaactttttggaatgatcgcaaaattaagatgttcaaacaaagcgacgcaattcaccacaatcactaacttaactataaattaaacgtagacgtcacgcaaaagccattttgtgtgacgtcttttttagtgcttataatttttttaatgtctaaacgtgttctatcagtcatattcctgcgtttaacgccgagaggtaaacggtgacttccagtcaccattcacctccctctgttaatcctcagaatatccctgactgatgacacactctccttttttagtgtttaaaaatttaataccaactttttttgtaaccgtcaccacactatcaagcgcactactggcgcctgttttttggctaaaaatccatttgtataccactttgatggttgttataatagcaaaccatacacaggaggtctttatgttagaaaagaacaaaatgagtttattcagcttagtcatgttaggactaagttcaatcatcggttccgggtggctatttggtgcttgggaagcaaccactgtcgcaggaccggctgccattatttcatggattgtcggtgcgattgtgattggtgccatcgcctttaactacgtcgaactggggaccatgtttcctgaaagtggtgggatgagtcattacgcgcagtacagtcatggctcattattaggttttatcgcgtcatggtctaattgggtgtcgttagtcacgattatccccattgaggccgtcgccgctgttcaatacatgagttcgtggccctggtcttgggccaactggacgaaccgtttcatgcatcataatgagatttcaacccgcggtttgctagtcgtttttgcttttatcattgtctttacccttttaaatttctggtcagttaaattcttgacccgtttcaccagtttcatcgccatttttaaattggcaattccattactaacaattatcatgttagtttcaactgggttccattctgaaaactttggccattcggtagcaacctttatgccatatggttccgctaaaatttttgcggcaacatcgatttccggaattattttctcctacaacgcctttcaaacggtcattaatgttgggagcgaaattcgggattctaaacgcaatattggtcgcgggatcgcaatttcacttggtattagtatcgtcatctatttattacttcaaatcacctttatcggtgctgtttctcccgctttaatcgctaaaaccggttggcatggtttgaatttccaatcaccatttgccgatttagcaattctattagggattcactggctcgccgtcctattgtacttagatgctttcatctcaccatttgggaccggcgtttcgtttgttgcatcatgtgcccgaacacttgcggccttgaagcaaaacaaacatatgcccgctattgttgggaaaataaaccatcaatacaacattcctcgggtcgcaatggcgatcaacgccgtagtcagcatgctgttagtttccgtcttcagaagctgggggacgcttgccagcgttatttcaacggccaccctgatcgcttacttgaccggtccggtaaccgtcatgtcacttcggaaaatggcgccggacatgaatcggcctgtccattcaccatggatgaaagtgatggcgcctttatcctttgtcctcgctagtcttgcgacttactgggcaatgtggcctacaactatcaaagttatcggcgtaattatgcttggcctaccattttatttctactatgaatatcggattcattgggaaaatacctgggcacaattcaaaggcagtctctggttgattatttatttagccttgctgtcattgatttccttccttggtagtcgtgagtttaacggtatcaacgtgattccttatccgcttgatttcgtcctaattagcgccttagccctcatcttctattattggggcattatcagtcgcttctactctaaatacttctcacgcgccaaacgaatcaataaggacgtacagctttaaaaagagtgtgtcatcagtcggggatgtcccgaggattaacagagcatggcgaatgattgccaacggtaattatttgacatgcggcgttaaccgcaaggatatgactgatagaacacgtttaagttaaaaatgtgccatcaaaaagagattgaagccaaaattatttttgtttcaatctctttttttgctatcatatcaacgtttctattagaataagcgataaatggaggcgcttaaacatgaaaaaatttaccgtacaatcaaccgaccgtcagcatcaactccatgtggttgcttggctaccaactcaaaaaccaattgcagttgtccagcttttaaccggcatggccgaatatatcgaacgctatgacgcactcgcccaatttttagccgctcgcggcatcgttgtgattggccacgatcatgtgggtcaaggacactccgttcagacgaccgatgaactcggctattttggcccccatggcttacagacactcttaaacgattgtactttaatcgggcgcatcgcccatgaagaatatcctgaatgcccgctatttgtgttgggccattcgatggggtcaatgcttgccactcaatatgtcaaacaaacaactgtcccactggctggcgcaatttttatgggcgttattgacgtcccagtcgtgctcaagcctgttttaccacttgtcaatttaatcggggctcttgcgcctaaacaacccggtaagcttttgaataacctggctttcggggtttatcctaaacgctttgacgccaaacggccattctcgtggcttagttataaccaggacaatgtagcagcttacgaaaatcatcccctttgcggttatgtattcagcaatagtggctttgcgatgttgttgacactgacagaattaacgcgccacgctgattggcaactggccttaaaagaacgcccagtgctagtcctgagtggccaagacgatcccgccggcggttatggccgccgcgcccgccatttagcgacacaatttaaaaagcacaccgtcactaacgcaacggtgcgcattttaccacatacagctcatgaaattttacaagaagtaaatgcggttgaacagcaacaagcgatttatgattggttgcttacagcaatttctgaatctcctgcaccacgccataattctcgttagtatcagcgtggtaggtggcatattgcaacatatcatcatcggcgttgcccattaaataactgtatttaactgtttgcagcatttccttatcattatacgtatcaccaaaggccatcatttcatccgttgaaatattgaaatgattagctagaaaacgcatcgcatggcctttatcaatccccttgttcatgatatcgacccattccacaccagctacggccactgaatagtcagcaccaaacgttggcccgtaaatttgttcgtaaaagtcgcggctattggcttctgggaagtaaaccgtaaacttatccgcttcaacactcactttagttaaatcaggaacgtatttgatttcggcatagaattgacggaatgtcgcatctaaagcttggtattgttcttcaatataaaccgcatccattccacaaatcatcccgattccggtttgactctcgttcacaaaagcgaccatccattgataatcagtcaatggcaataaactcttgaagataatgtcaccttgataactgataaccccgccattatcacctacgagacacatgtcattttctaaattagcaaacatctgcttcaacgtataaagtggccgaccactcgccgctgtaaaaatgatgccttttgccgttaactgtttaacaacttgttcaaaattcggtggcaactggccactttcgtttaataaggtatgatccatatctgatgcaattaatttaactgtcatacttaacgctcccctatccttagttaccttaataatataacggtttcggcccgccgtcgcaaccgtttacatccaactcattaaaaatagcactggcgcatttaacgcgtcagtgctattttcggtcttatgctaattttaatcgttttagtcgtaaggcatttaataacaccgacactgaactaaaactcatcgccgccccagcaatcattgggtttagaagtggacccccaaacaagtgcaggacccccattgcaaccggaatcccgagaatattataggcaaaagcccagaaaagattctctttgatattttgcatcgttttccgacttaacttaaaagccgttggaaccgccattaaatcatcgtgcatcaacacaatatcggctgactcaatcgcgacatctgtccctgaaccgattgctaagccaacatcggcttgcgctaaagccggcgcatcattaatcccgtcaccaaccatcgccactaattgaccggttgcttgtaaggttttaatttgggctgccttttgttctggtaaaacatcactaatcacttgttcgattctaacttggtgcgcaattgcttgggccgtcttttggttatccccagtcaacatcacgacttgaatccccatcttttgcagacgactgatggccgcttgactcgttgctttaaccggatcggcaaccgcaattaccccttgtaattgaccgtcttgggccaagtacatcggtgtcttgccttgttcggctaattgttgcgccgtcttcaatccggcttcgattgcaacgccattttcagccattaattgttgatttccaaatagaattgtctggttcgcaacttgggcggatagaccgtaacccggaatggctgtgaaatcggccattgctgataaagttaattcacgttcactagcagcttggttgattgcactcgctaacggatgttccgaaccagcttctacactggctgccaattgtaacaagtcgtcttcagtgccctgataaacaaccatgtcagtcacgattggttggccggcggtaatcgtccccgttttatccaatacaacggtttgaatatgttgcgccgtttcaagtgcgtcaccgctcttaatcaagacaccattttcagcccctttgccagtccccaccataatggccgtgggggtcgctaaccctaaagcacatggacaagcaatcactaaaactgaaatcgtaatcgttaacgcaaagagccacgattcttgccctaaaaagaaccacgctaaaccggataataaggctaagccaatcacgattgggacaaagacgcccgcaatcttatccgctaaccatgcgatgggcgccttagtcccttgcgcctgttcgaccaattggacaatttgcgccaaggccgtatctttgccaatcttagtggctttaaattggaaatgaccgtttttatttaagctggccccaataacggcatcgccaacttgtttttcaaccggtaaactttcaccggtaattagcgattcatcaaccgccgaatgacccgcaatcaattctccgtcaacaggtactttttcaccaggacggacaacaagaacgtcgccgacgaccacttcggccacatcaatcgttgtttcgacaccatcgcgtaaaaccgtcgcttgtttaggcgctaaattcaacaacttttcgattgccgatgatgtctgccccttagaacgcgcttcaaaatatttacccaacgtaatcaacgtcaaaataacactggctgattcataatagaggctcgtcactaagtcgatatgcccactgataatcgctaaggtggcgattaagctgtaaccccaagcagcgctagtaccgagtgcaactaaggaatccatattgggatggccattgaataacgccttaaacccaacaatgaaaaattgccgactccaatataataccggtaacgtcaatactagttgggtgaccgcaaagttaacgggcgcttgcatcggttgccaaaacgccggtagcggtaagccaaccatatgccccatcgataaatataacagcggcaacgtcacaagggccgataaccaaaaacgccgccaaagggcttgtaagtgagccttacgtttggcctgaatcgcctgcgcttctttttccgggtcaatctgttccgttgcgccataccccgctgcgctaaccgcgtcttcaatcgcggtcaccgataattcggaatcgtcatattcgacctgcattttttcagtggccaaattgaccgccgctttttgcatgcctggcaatttttgcgttgccccttcaatcgtttgtgcacaagaagcgcacaccatcccatcaatgttaaacgttttggttgtcatttgctggttgctcccttcaatccggtaaccctagtcgaccgtgtagtgtgtgccttcaagtgctgctgccaatgtggcatgatcaatttcagtagccgtttggagcgttgcttgtttttgttctaaactcacttcaacggattgagcccccgcaatttttgagaagcgttcctgcacgttttgcgtacaaccatcacatttcatccctgtaattttaacgatttgtgtcattgccatatcctccaatatctacatttgtaaactaattgttcaaaaaaataatcgcctcagcgaaacgatcattcattcaataaagttagtttacaaccgtagacttgaaaagtcaacctaatcatcctgagcaataaaaaagactagccgggttgctaaaaacaactcggtcagtctcttataagcacttcataatgcccgtggcaggattcgaacctgtactcggttacccaaacagcgacctgaacgctgcgcgtctgccagttccgccacacgggcgatttgctacatgactattgtaccagtgttgtgaagccctgccaatacccttttaatactatttcgcttataatagaggcaactaaaggaggtcatcgtatgcaaattatcacagacgaattggcccgccaagtgattgtggctcggcccgctatcagtcacaaaggcgattttggccgtattttaatcatcggcggtagtcagcaatatggcggtgcggctattatgagcgcctctgctgctgtttataccggggcggggttggtttccgtggctagcgatttaagcgtcctctctagccttcacacccgtttacccgaagccatgtttatcgattaccggcaacccttcgtacaatgggtacctgccgttcaagccgccgatgttatcgtgatcggtccaggacttggactgagcgcctttgcgtcgcttcttttaaaacaagttttgcaagctgttcggcctgaacaaactctcttaatcgatggttctgcgcttaccttaatcgcccgcgaaaaactcgccctgccggatgcgcaactgattttaacaccccaccaaatggaatgggcgcatctaagcggtctatcgattgaacaacaaactgtcgccaataatcaaacggcactggctgattatcccaaggccactctcgtgctaaaaaaacaccacaccgaaatttatcaccaaacacaagtcagtcagctcatgattggcggccccgcaatggcgaccggtggtagtggcgatactttaaccgggattatcgcagctttttgtggtcaattcgggaccaattatcaaactattagcgctgcggtctatacgcacagcgccatttcagatcagctcgcccaaaaacaatatgtcactctacccactcaaatgattcaggctttaccacaattcatggcgcagatggcccatcaataaaaatagcagtccgctaaaagcggactgctatttttatgttgctctttgtaaagcatcaatttcggttgttgttaacgcccggtattgtccacgttttaaatcagccggcaagcttaacggccccatctgaagtcgctctagtgttaacacttctttgccaaccgcatgaaacatgcgcttaacctggtggaatttgccttcatgaatttcaacttcaatcaagctttctttgcgttttgtatcagtacttaaaatcgtcaattgtgctggttgagcatcaaaatcactcaactttagaccggcagcaaattgtgattggtcagccgctgttaccaccccggcaattttagcgcgatatgtttttgtaacgtgttttttcggactcaataagtcgtgggctaagtcgccatcattggtaatcaacaatagccccgtcgtatccttatccaagcggcccactgggaataagtcttcccgataatctgctggtgcgaataaatccatgactgttttttgcggatcgatcgtggccgaaataacccccgccggtttatttaataaccaataaaaattagtttgatagcgaatcggttcgtcatcaacgtaaaccaccgtttctggggtcacttgatatttcgcttctttaataactttatcggcaacatgaacccgccctgcctttaataatggcttgagcgttttacgcgtgccgacattcatatgacttaaaaaacgatcaattctcattttaatttcaactttcttctaaagcggtctaagttactgcctaggacataatcggctaagcgtgatttcaacgctaaaacagcatagactaacccaccaactgcgacactaatcgcaaggacaagcacactttgaagccgactttgtggattaaacactaacaataagcctttgaccgttagtgatgtgatcagatacataatcactgagaagccgataattccgattaaacggcgaatcgtttgccaagcatcaaaatgataatagcggtgtaatgcggctaacatcaagattgaactcgtcgcaaaggctaagccagttgacacaagcggaccgtatacccggaagaaataaatggctgggtattgggccacaattttaacgatgaacccaatcaatagatagaacaaggccaaccggttttggtataacccttgtagaatcgctcctaagaccgtgaagaggcctaagagaattgaaatatacgatgaaaattgtaagacactaatccctaaggcatcatgtgagtagaacaaagtataaagcggtccggccacggctgccatcccgaaagccgctggaatcatgactaaattaaagagttgaatggtactcccaatttgttggcgtaattctttttgattaccacgaacatgagccgcagacatcaatggcaccgccgtaacagccattgcggccgctaatgaaacggtaattgaaatcagcttattcgcattggcggcaaataaggcgtacaagttatcgagttggtgattattagcaatcacaaaatcgtgcatcatcggattaaaggtgtattgatcgatgatataaaccaagttaacactcgcatcgataacgataaatggaattgattggcgaataatgcccttcaataaatcggtcgtcgatacttctagctgattattactgccggcgattaattgagaaatgcgcccgcgttgtttgatgtaatggaaaattaataataacagtcctgcagctgccccgatgaaggccgcaaacgtcgcctgcgtgacagcatcgacataactgcccttcatcacttgcatgatcatgaaggcggaaaccgtcatgtaaagcactcgtgcgacttgttcgatgaactgtgaaatcgcagacggtgccatttcggaatacccttggaagtaaccccgcatgatactcaagagcggaatcactagcaacggccaacttaatgaacggaaaaccggcaccatccgtggatcaccggctgccaagacaggagctagtgcatatagcgccagcgccgataagacacccatccccaacattaagatcagtgattttttaaaaaggcgttgccccacgccatattcattcatttcattataacgcgcgatttgtttagataatgcgcctggaatcccagccgttgaaatcactaagaaaacactataaatctgataaccccgggcgaacagtgtattggcttgtaagaaatttgagccaaaccaaattggccatggaataacgtagacagcgcctaagattcgcgaaaaaatactgccggcagtcatccatgcggaaccgcgtaacatctgattctgtgaagatttatccgtagtccccgttttaggtgaattggtcatttcacatactccctctttcaacatcaaaaagcatcttcctaccattttagatgattgcctgaaaccttgcaattcctttaacaaaactttatgaaaaaagagtgctaatgatgacggttagcaactgagcattaattaaaaataaccattaatcttaaaagcgagattaatggttattttagattaagcggaagttgttgtcatcagaagcacgtttcaaatcagagtgctttaccgagcgattaacttctgagtatagcatagcttggtgaatgagccgcacagcggatcgtttgctaagcgtcgctagacggaagaagttactcgttaaagcacatttcaaccgattatcttatgcggattaggcacaaaaagaagctggaacaaaaataaatttgtcccagctcccttttttgatattcgaacgataatcgtctaaacgtgttccataagtcctatccttccggttaaccttgaatgtcaaacaattgcttacagtaatcattcgccatcctgtgttaatcctcaggatatacccgacttatgccacactctctttatttcgttgtttgtttaatcaagtaccatgttaataagatactgatgaacaccatgatgctcccgaaaattggtgtactacccaagccccaagcggcagaagcttgaccgccgaccaatgagccaatcgtaatcccaatgttaaaggctgagatattcaaagccgatgccaatggaatatcgtttggtgtgaacttttcagcaagttggacaatgtaaagttgcaaaccaggaacgttcatgaaggcgaaaaagcccatcaataagacgttaattaaaccaaaccaatgtgaattcaatgttagcatgaataacatgagggttactaataacccaacaaacattctcaataatgccaacaaaggtttgtggttagaccacttaccgcctaacgtgttccctacagcaaccattaagccataaacaactaagataataaccaccgcacttggtgaccaacccatcttcgtttgtaagattggtgtcacaaaagtataaactgtgaatgtgccaccataaccaagggctgtaattaataaggcaatcacgattgctttatttttgaagacccgaataatcccactaaattggcttggttgacccaacggtaagtcgtttggaaccaagaaccagttagcgattaagcccaagacaccaatgccagcgatgaaaataaatgacatgtgccaggttgaaatttgaccgatgaaagtccccagcggtaccccggtaacagttgcgactgttaaaccagtgaacatcacggcaatcgcacttgctcggcgttctggttccacaacatccgccgcaatcactgatgcgattgacataaagatcccgtgtgataacactgaaataatccgaccgattaaaacaactgagaagactggggcaaaggccaccgttaagttaccaatggtaaagacgatcataatccccaacaataaattcttccgtggccaacgactggttaagatagccaaaatgggcgcaccaatcgtaatccccaaggcgtacattgaaacggttaagccggcttggctcattgtaatcccaaaatctttaatcatcaacggcattaagccaacactgatgaattctgttgaaccaatcgcaaaggcactaatcgccaatgctaacaaagttaagttcgcacgttgctttttactcattttcccacactcctaatagacttttttactgatgtactatattattcaatagaagcgtcattttcacaatcacgcactttttagtcagtaggttactgaaaagtaataattgagtcttatcacaatgaaaaggtgaatcaaaattagaaatgaatgagaaaacttataacattggtgttgaagccacgatggaaatcatcggtggtaaatggaaacctgtcattttatgccacttacggaatcaaccactccgctcaagtgaactcttacaaaatatccctaaaatctctcaaaaagttttaacgcaacaattgcgcgaactcgaagccgacgggattatcaatcggaaaatctatcaagaaattccgccgcgggttgaatacagcctctctgaatacggtcaatcactcaataagattttgaacctactctgcttatggggtgaagataatatcgaccgccgccaatcagctggggaatcgatcaatgtcttgcatcgtgatcaaattaatccaatctactaaaaaagagcgctgtaggttgcgggtagcaactgagcattaatacaaaattggcagtaatccaaggttttaggattactgccaattttagattaagcggaagttgttgcaaccaaaaagcacgtctagacgataggagtctggatagcaaaaaaggcaccaggacaagtaatgcttgtcttgacgccttcttcactatttgaatattggtagtctaaccgtgttctataagtcatatcctgaacttatggcacactcttctattctttttgacgtccaaacttcacgaaataaataacgatcatcaagactaaaaagattaagccaacaattaatgagatccgtgtttctgggttaataaacatgaatactaatgttaagcacaacattgccaacgtgatgtagttggaatatggtgaccatggcattttaaatggatgggtcgccatcttttcggcgtgttgttttctaaaggcgatttggctaattaagatgacaaaccaaggcaccattcctggcaagacacttgaactataaacaaggacgaagatgttgccggctttaggataaaccaatggtagaatcgcgtttaaaatcacaccaattaaaatccctaatgaaatcgcaccaactgcgtagaatggcacgccatgtcggttgagtttcaagaaacgttttggtaattgaccattattagccaacgtaaacgtcattcgactcgcactgtaaatcccagagttagcgcctgataaggccgctgtaatcacaacgaaattaataattgaggctgcggcggtaatgccgattttagcgaaggtttgaacaaatggtgaaccaacttggttgagttcattccaagggtaaatacttaaaatgacgaaaatagcaccgatgtagaaaatgaggatccgagcaacagttgattgaatcgctttaactaaggtttcttgtgggttttcggcttctccggccgtaatcccaattaattcaatcccttgataagaagcaaggacaatcgcaagggcaaagacaaagcctttgaaaccacccgtgaagaaaccatgggtccataaattactaatcccaaccggatgcatgtgattcccaatcccgaagatgattaatccgagaccagcgacaatcattaacacaatcgtcaccactttaattagcgcaaaccaaaattctagttcaccaaacatgctgaccgatatgagattagcggcacataagaacgtaattgcgactaaacctggaacccaccctggcagattcggccaccaaaattctagatagccaccgattgcaatcatttcactcatcccaacgaccacaaattggaaaacattactccaagctgtcaaataaccaaaaatggggtgcatatattccgttgcaaatttcgcaaatgatcccgtatctggatcaacgtacaacatttcccccaaagcgcgcatgattaagtacaataatagaccggcaatgccataagcgattaagacagaaggccctgtccatttaatcgtcgtattggcccccataaacaaaccgaccccgattgtcccacctaatgcaatcatctgcatctgacgggcatttaaattccgtttcattctcctcaaacccttctatttaggtattcccattgttggttaacctgacaatctaaatttacttatcatcgtataataaaaaaagaggaaaatcaatgccttttctaatctttttatcattttagaatgctattaaataaggttttttaggtcaatagtatttgttaggttcctaactattaactttagataagaaaaaaggacagacaaaattgaatttgtctgtcctttttgaaacgtgctttttcaggtatatcgttgtggttagctacgtcccgcaaataatcgactttgtcgattatccacgagcctaggctaatctttacgatataaccacctgaaacacactcttttttgaaacgtgctttttggttgcaacagcttccgcttaatctaaaactgcaaataatcctaaaacctggattatttacaattttttattaatgctcagttgctgaccgcaaccaaacgcactcttgtctgaaacgtgcttttcaagctaactttctgcgcttatcccagtgaatcaaacaaccgactgcgtcgcttattcgcttccctctgataatgctcaaaagttgaccgagcttgaacgcactctaattcgctacaatatttaccaatttgtttggaatggcaatcactttacggactgtcttgtctgcgataaattcggctactttttcgttggcctttgccatcgcttctaattcttccttcggtgtatctttagccactgttactttggcctttaacttaccgttaacttggaagataacttccacttcattggcgatcaatgctgctgggtcaaatgttggccaatcaacatagctgattgaatcatcatgaccaagcattgcccataattcttccatcatatgtggtgcgattggggctaataatttcacgaagccttcagcatattcacgtgggaatgtatctgctttataagcatcgttgatgaagaccatcaattgtgaaatggccacgttaaagtgcatgctttcgaagtcttctgtcactttcttaacagtttcgttataaaccttcttcaattgatcgttgttgtcagcgacaatcttgcttgaaagttggtcgttttcgtccgtatcttcttctgtgtataaacgccatacacggtccaagaatttacgagcgccggctaagcccttttcactccatgaaattgaagcatctaatgggcccatgaacatttcgtatagacgtaatgtatcagcaccaaaacgatcaacaacatcatcagggttaacaacgttcccttttgatttagacattttttcgtggttatcgcctaaaatcatcccttgattgtataggtgttggaatggttccttcgttgggacgacaccgatatcatacaagaatttgtgccagaaacgaacatatagtaaatgaagaacagcatgttctgcaccaccgatgtacatgtcaactggtaaccagtccttcaacttgtcaaaatcagccaatttatcagggttcttaggatcgatataacggaggtaataccatgaactaccagcccattgtggcattgtattcgtttcacgacggcctttacgaccattttcgtccgtcacgtttaaccagtctgttaagttcgcaagtggactttcaccagtaccagaaggtttgatatcgcttgttaatggtaattcaagtggcaattgatcttctggaacgacagatgttgtgccatcttcccaatgaataattggaattggttcaccccagtagcgttgacgtgagaataaccagtcacgtaatttataactgatttgttcatgacccactttgtgttcaaccaaccatggaatcatcttgtcgatagcagcttgtttgtctaagccatctaagaaatctgaattgatcatcacaccaggttctgtgtgaacagcttcttcagggttaccgcctgaaacaactggtttcaatggtaaaccgaatttcttggcaaattcccaatcgcgagggtcatgtgcaggaacggccatgacagcaccagtcccgtatgaagctaaaacgtaatctgaaatccagattggtaaacgttcgccgttcactggattgatggcataagcacccgtaaaggcacctgttttgtccttagccaaatcagtccgttcaagatcactcttgtgttcgatttcttttaagtatgcatcaacggcagctttttgttcaggcgttgtgatgtcagctactaatttgtgttctggcgccatcacgatgtaactcacaccaaacattgtgtcggcacgtgttgtgaagacgtcaatattagcgtcatggttttcaacagcaaatgaaacttcagcgccttttgagcggccaatccagttacgttgcatatccttgacactttcaggccaatcaacaaggtctaagtcgtcaattaaacgatcagcataagccgtaatcttcaacatccattgacgcattggtttccggtaaacaggataaccaccacgttcagttttaccgtcgatcacttcttcgttggccacaactgtccctaaatctgggctccagttaacagcaacttcggcttcataagccaagcctttttcgtacattttttcaaaaatccattgggtccatttgtagaaatcaggatccgttgtattcacttcgcgatcccaatcgtatgagaagcctaatgaattgatttgacgtttgaaagtgttgatatttttttgcgtgaaatcagcagggttattccccgtatctaacgcatattgttcagcaggtaagccgaatgcatcccaacccattgggtgcaacacgttgaagccttgcatccgtttcatccgggccaagatatcagttgccgtatagccttcaggatggccaacgtgcaacccttgtcctgatggatatgggaacatatctaatgcgtagaaatttttcttatctttatcttctgttgttttaaaagatttatgtgattgccagtaggcttgccacttttgttcaactgcgcgatgatcgtaagtcatatcaaacactccttatttttagcgtactttcaaaagtatagacacttttgacgcactcttttttaatccacttaacgtcaaaaaaagtcctatggtataaataccataggacgaattgaccgcgatgccacctaagttctgcccagttcaaactgagcaactctctggccgtaacgtggctgacgtttctatctacttgatttcaatagaaaactcaaaggtgagttcgctaagttcaacgacgtgttcgcactaaccacacgctctctggacgtttcacttaactactaatccctctcaacgttaaataattgttcttagcataccaaactcttacttcaatttcaagacttggccaactaagattaaatctgagcgtaaattattggcagtcttcaattggctaattgtcgtaccatttttttgagcgattgaccataggctatcacctgatttaacggtataagactttgttttattaggcgttgtttggttgttattgttagttgttgttttaccagcactgacttttaacacttgacctggataaataaaattatttttaatgttatttaaacgaaccaattcagccattgagattcctgattgttgtgaaatccgccatactgaatcaccagctttgaccttgtaggttttagcggttgtcgttgttgagccattgttattattactactgctattgttgttgttatttgttggcggtgttgtttgtcccgttgatttttgaccaacaattaatttttgaccaggatagatgaagttattacggatattattccacttcactaagttcgccattgaaacaccatagcggtttgagattgcccaaactgaatcgccagacttaaccgtgtaagtttggttattcgccggtgttgttgggttcgttggatttgtcggtttagttggattcgttggtgttgttgggtttgttgtttgtttagcagaaacaatcaaaacatcgcccgggtggatcatgttatttttaatgttattccagctaattaacgtattcattgaaataccgtaacgcttagcaatgccgtaaactgaatcgccggctttaactgtgtatttttcaccatttgctggtttttttggattcgttgggttggttggtgtcgtcggattcgttggtgttgttggtttgttagccgaaacgattaagacatcaccagggtgaatcatattatttttaatgttattccagctaattaaagtactcattgaaatcccataacgtttagcgatgccgtaaactgaatagccagctttaaccgtatacttttcaccattcgttggtttagttggtgttgttgggttcgttggtgttgtgcccgtaccaccattattaccacttgtagcaggtgtatcatattgcgttaagttatattgttggataaggcgatttaaactagccgcatagttcgtagctgtggcatagcgaccttgaagatattgcgtcgcattttgatagcttgttgtgtggctcttgaaggccccttgataataaggtgttgacccaaaagaagtattcttcaaaacatgcacgtaatcttgtagtgattggtaatatgaaggatatttacggaaagcagcgttgatttgataaagattaccatgaccatcatcttcgtttgttaacatgtagacagagctaccgttgtaactccctttaacaccgaataagttgtagttaggggctttgcctaaagcgctattcccaaaacctgattcaagagaagcttgggcaatcattactgaagcatacaaatcattttcacttgctaattgacgtgctgagctagcaattgaattgatgaaagttgatgcactggttgatgaataagccataatggcttgggctgttgcgatattagcacccgtattttgtgtgccaacaactggttgtgcttgtgttggtttgggttgagctgtagctgccttattcgcatcattttcagtcacttggggcttcacaactggttgtgattggctttggctactacttgttgtttggcttgattgactttgactgctgcttgttgcttggtcagtactacttgttgaggtcgtactattagcaacactacttgtgcttgatgtcgctgtattgaggttggtttcgttggcactcactgtttcaacagctgccttaactttaccgctcgtgagactaggtgcaaccgcagaccccatcaagaaactagctcctgcaaaagtcgtcatatgccgcactttcttattccgtagttcctttttttgacggtttaaaattattttttgtgtcgcgattctttgttttctagtctctttcaacataaaaacctccatataaattttctttaaagtaatagctatctttattaagtttatctaaaatatattataatattaataatcctataaaacaacgtatatgttataagcggttaataatcgatttaaaattagttcaaggcgacagaccgttaacattgttattatagaatttgaaaggggttcactatgtctcgtcaaaagcaacaactcacatcaatgatagtgggcttttcactatttatgattattttagtcagtcttttaaaccaagcaacttggattaatactttcgatagtcacatcattcatatcgttcgtagcgttgcttcacctttaacaaccactatagcaatcgctatcacaagcataggtaatccttatagtatgctgggattaacagtcgtagcaacgctcaccttactcttcatccgccagaataatgctgcgctcttcttattagtcaatatggcggttttcagtagtttaaaccacattattaaagaatgggttgctcgaccccgacctagcgcgcatcatttggtagtcgctagcggctttagttttcctagtggtcattcttctggtgccctattattttttggctcattaagcattattgccatttacctgattaaaagtcactattggcggcacctagtaattggtttgtgcttaatactgacgctcctcattgggattagccggatttacgtgcaggttcactaccccacagatgttttagccggtttcatgttagccttaaccggattaggcctttcgtggtattattttgatagctaccacctattgcagcaaaaatcgtaattaaaggggatttttatcatgctacttgatcagccaagttcttttgcccacttcctattagaccaggccattcgcccaggcgatgttgtcatcgacgccactgttggccatggcgacgatactttatttctagcggaaaaagttgccgattacggccatgtttatggcttcgatattcaaaaagaagcgttggcaacttgtcaaaaacggttaacaacggccaatcttagccagcaggtatccctcatcaatcaaggccacgagcgaatcattactgctcttcccgccgatttaaaggtacaagcggccatcttcagtcttggctcactttcaccagagacttctcaagatgtcacgctccctaacacgaccatctcggcttaccatcaagtcttatcccgtctcaatcggggcggtttattactttttatcattgataatcacttttttaaatcggaagaagaaatccactacttagttgcagatttaacccgcctcaatcctgagcgttatgcagttcgccactttcaaggcgtcaaccaagatgtcggtcaactactgaccgtgatcaaaaaataaaaaggtttccggataaaagttatttttatccggaaaccttttttgattgctcaatttttggattaaccaacgattttagtgccatgtgcttctgtcacgtttaatcgttcagtaataccagcaacgttttccgctgtaatgccaccgcctggtaaaatgcctaagcgaccgtcagctaaacgcactagttcttgaagacgttcttcatttaacggtgccgttaatgggccaccatgcgttaaaatccgtttaacatcatgttcaaccaaccagtcgattgcttcggcttggtcagctactgctaattcgtcaaaagccatgtgaaaaacaacttgcatcccattggcagcgccaattagcatttccattgcttcatcatcaatcttattgtcaggtgttaagcaacccacaacaatcccgtcagcgcctaattcttgtgctgaaaaaatatcagcttccataatttttaattcttgatcgttatagacaaagttaccaccacgggggcgaatcatgaccatcactggcacatcatgttcatgtgcataacgtactgattcagccataacaccacgactaacagtggtgccgccaaccgctaagttgtcgtttaattcaattcgtttggcaccattacgaatggcagccggaatttcggtgaaattttcgacacaaacttctttgattaacatgggaaaacctccaatttttattttaaacgtgctttttgggttgcaacaacttccgctcaatctaaaatttctattaatcctaaaatctggattaatagaaatttttaattaatgctcagttgctaagcgcacccaaaagcactcatatccaaacctgcttttaattagcaactttctgtgcctagttctatccgtcaaatcaccgacgctgtcggtaattcgccagattgactagtgctcaaaagttaaccgccaattaacgcactcttttttaaacgtgctttttgaaacatattcctgcgcttaacgctatttgccaaactagcgattccatcgctaattcgtcaaatcaggttaatgctctgaatatacccgtttcaaacgcactcttataagaacattgcgcctaataccaatacccctaggataatccggtaccaaccgaaaaccttgaaatcgtttttcttgatgtaacccatcaagaacttgattgaaatgattgaaatgatgagtgagacgaccatcccgaccaataaaataattgattgatcaccagtaaaggtattgccttggtagaagaacttcccaatcttcaagatgctgaccccaatcatcgttggaattgccatgaagaatgagaattcagccccaacaaaacgtgatgtcccaattaaaatcgcccctaaaatcgttgcgcctgaacgtgatgtcccaggaataattgataaggcttggaaacacccaatccaaaaggcggttaaccaaggcaacgtatttaaatctgcaaatttgggtgtgcgttgtttattgcgattttcaataacgataaataaaataccatataaaattaacatacttgcgacaacccagttttgcattaaatgttcgtccatccaatcattcaatgggaaaccaataatcactgacggaataaccgccaaaataaccttaaaccataaagtccatgtttgcttttgctctaattgattcttctgcggtgaaaatgggttcaatttatggaagtataagacgacaacggccaaaatcgcaccgaattgaatgacgtaattaaacatatccataaaggcttttgattcgcccatttttaaaacactacctactaagactaaatggcccgttgaactaatcggtaaccattccgtaaaaccttcgacaatccctaaaataattgccttaatcacatttaaagttaacacaatctccatccctccatgaaacgtagtcgttctctagtatactaatttcaaatctagaatgcgacttaaattagaagtttaaggtttttttattaaaattaaacacaaaaaaagaccgccaaatcacggccttttgcttatttttagagtgttgtttcatcaaaatcaaactggcgttgcgctaaaacggcgctaaaatcagctggcaccgggcttttcaccgtaattgttcgttcttcaaatggatgatagaacgtcaattggcggcaatgaagtgcttggcgcggcaatagatcatcagattcaccgtagaggttatcaccaattagcgaatgccctaacgatgcaaaatggacccgaatctgatgtgtccggcctgttagtaacttcaatttaacgagtgtggcgccatcgccgtgagcggcttgccaatattcggtcaatgaccgcttaccaccttcgccgaccacccgtcgcatgtagaattcttccgagcgtttaatcggacgatcaatccacgcatgttgcggtaaatcctcgcgcatatcaccactagcaattgcgatatacgttttttgtaattctttcgactgtaactgtcgatccaacaaactatgcgcaaaaccatgcttagtgaacatcatcaagccgctcgtatcacggtccaaacgcgtgacgacatgaactgcaagactttcagcttgttcatcaatcaaatactgcttcacaaagttagccatcgtgttattcggatggttgggtgccggcagcgaagccacaaaggctggtttatcaacaatcagaaaatgatcatcctcataggcaatttttaaatcacccttcacaggaatcacgtgttccaccgctacttctggcgctagataaaccgtcaccacatcattttgaactaatctaatattggtatgggcttcctgaccgttcactaaaatctgcccacctgagaatttaatcttcgatagctgactccgagaaatctcatgtcgtcttaaaaaattgcgtaaaatacagccttcgctgtctgtgtattgccactcaaatttcatgttttgacccaataaatgcatcttcgacgcgatcccagaaatgggtgtgtcggtaacgtgcaaattgtattctttcttttgcaattttaaattgcattgattcaattggtcgatccttaaacgtaaactgatcaatcgtcacaacgtaatcgctggtgcgtgagggttttaatagtaaccactcatcagaaggcaacacaattggtgcggccagtgtccggtaaacccgattattaatcgacgcaatttcggtcaattgcatcgcttctaagcgtggatgtaagactgcaccaccaattgatttcccataggccgttgagccggttggtgtcgaaacacatagcccatcgccacggaagctttcaaaaaagttctctttgatataaacatcagtccgcaaggttgccgcgtaacgccgcaacgtcacttcattcaatgccaagaagtgttggacttcattggtatcagcataggtaatcttaacttcgagtaacggataactaatactctgacccaaatcttcttgtaaagcgaccactaaatcatcaacttcaaaatcccgccaatccgtataaaaacccaggtgccctgtatggaccccgataaagcggatttgatctagcgcatcggcatagcggtgaaaagcagacaataacgtcccatcaccacccactgaaatcaccacttctggtgtttgcgcgtccatcgtaaaaccgttgttaattaacttattggtcagtttatcagccacttgtcgagaagagctgccgtcattgctatataccgttattctcaatctggggcatctccttcagaatcattttcagtcgccttttctaaagcactctgccacttgccatatgaaaagagttgttgtgcttcttgaatttcttcgcgaatttcagacatttctttatctaacataaatgacgcttcggctgcccgttttaaacgtgctttcaaggtttcagggaattccccttggtatttataattgagtgaatgttcaatcgtcgcccagaaattcatcgacattgtccgaatctgaatttctgccaaaatcaatttttcaccactaatcaattgcacggggtattccaccacaatgtgatatgaacgataaccactaggtttaacgtttgaaacgtagtcgcgttcctcgataatcttcatatcggttcgttggtgtaatagacccacaatttcgtggatatcctcgacgaactgacacataatccgtaatccagcaatatcttgcatatcttgttccaataaatcttctgtgatataccgccgttgcattttctccttgatactatcaatcggtttgacccggcccgttacaaattcgattggggcatgttcattattttgttgatattgtttacgcataccacgtaattttattttcaattcactaacggcttgttcataaggcatcaggaattttttccaattttcgaccataataacccctcattcaatctgtcacatacagcattattctaacatatattggaaaagaatagatagcattcctcccaaatcaaatacaattacaagttttcaaatttatgctaggatagtcttattctcaaaaggcaggttattaaatgacacagaccattgaacatgaatttaaagtcagtctcactgaacaacaattcaatcaactgcgggccgcctattcatggccgacaccttttacccagaccaattattactacgagctaccgcaaaatggtttgtatcagcaacatatggggttgcgcactcgcctctaccaagaacaggcagaacagaccttaaaagtaccccagactggtgcgacacgcaccctactggaaatcaccgatacaatgccattagccactgcacagcaattgattgcgcaacaaaccattcagcccgatcagcaaattgctaagtatctagaaacaatcgggattgattgggcatcccttttcatctggggtcaagcaaccactaagcgtcaggttttaacactgcctagtggtcgcctaacattagatcaaacaacctatccggatcagacagctgactatgaattggaactggaatttgacgatatgccactcgcccaacctttcttccaagacatcgttgcgcgtttcaaattaacacaaacgacaccactcaacaagattcaacgtgctaaaaatcatcaaagctaactaattgcaaatccaaaaaaatttgttaaagtaagacaagagctttcaatacgagacttaagtttgggggaaccattttgttagaagtgtttttatatattaacccgatcggccaacgttgcttgcaatccgaaaaggcacttttaaaaattattgacgaggctgatatgaacatccatttcaagttcatacccgtcctcaacttacaaaacgttgaacgttacatgcaatttcaaaatttaaaccgacgtgacttagacttaagaaaccacgtcttcagtacgatgtacgaagcagtcttagcttataaagcagcgactttccaaggaagtaagaagagccaagcatttttaatgcagctccaacaagtttttcaacaacctgatactacccttgatactaaattagttttagaaatcgctgaaaaggcccacttagatactgaaatgttactcgaagattggcacagcgatttaactaaacaggtttttgattccgatcaacaactagcctgtgaaatgaacattaagatgacaccttccgcagttgcctttgactattctaaagatgactctgaagccggcttattaattgaaaattgtgattcttacgacctcttgaaagaggtttgttctcagggagtgagtcctgaagacacgtaccaaaaattacaaaaacataaagctaatgtgactaaaatcgcctttcgcgtactgtcgtaatccgtcattcagcactaaataagcgctcaagattttaaacagtcttggacgcttattttttagcccgcaaagcctgttgtagcctgcaggttggccaatctcgaaaagcttgttggccaattaacggttgatttaaggtgggacaaaactgcgaaaatgtggttacgggttgctcagccagccaccactttaagcgactttcaaactgattctgctgataaagtggtggcactaccgattgataaaaacaccaatcaggggctttttggagtaacgttccttgttggtaacaaatctgttgcaagcggacaaaacgctcatcacgtagctttagtcgttgcatcagccgcgctcgttgccaatcaatcggcatattttgaatattgattggttttaacaaacgatttttacttaaaaatgcgactagttgacgcggtttaaagtattgtgtccgccactgataaccttgaaattcaagcgcaacgacgtgatgttgcaagacccaacggtgcaattgcgtgctgtaacaaaatagataaaagccccatgccgggcaataatttaaaaaagccaattgttgccgactaagatgacgggatttaaaacggaaccgatcaccaactatccaagtgaccgccaaaccacttgcatgatacccctgcgttcgttttaacaatcgtgtgggcgtcaacggactacattgatactcaatcacttgtgactcacaattgagctttgttaaatagacatcggccctctgctcaggattaacaaccaactcaaaatccgcctgccaccccagcgcattagcaagtgctgcaatcgccaccttaccagtttgatgggcgtcactttcaccgccaccacccaccactttagtttgatgcgcaaaataaggaacagtctgctgaccgcccttgagctgaacaggcttttggcaccgcgggcaaaaatactgaccacttccaagtaagacggcatctccagcagacaccaactgaccagcaagattcaaagccattttcatcaaaacaccccaagaaaaaatacgcaaaaaagccagttaattattcatcaactggctttttaattaatctttaaaatagtaacgtgttaattccaaggcactattttccattactctctgaccatattcacttaagaaatcagcggtgtaatttgtcttatgaccaaattcattagcgaccgctaaatcatcttggacaaacgtttccgttgtattttctaagaagaacactaattgcgcgtaatattgatgtttgtaaacaaaaaggttcgaaacaccactttcaatgtgcaactgttgggcgagtgcaatccaatcttcaaatgtatcaaagcctaaaacaacttgtttagttgggttatccacttgatttaaataagattcgatttcgtcgtcttcttcgtcatcctcagaagaggccgtatcccgcttcaatagttgatccttaatatactctgtaataccgtcttttccctgaaccatttctgattgtgctttgttcaaatcgagattagataaattcttactaattaataactctaacccctgttcattaggtaacacttggaaagtgaccgcatcattattagcgaaaacgtgatcttgatcaacttcttctagaattgaatagaagaagcgctcgatttttttatgattactcaataaatcaagaccagtaatgccacgttcttctagatcatcattttccaataaaacacgaattgtgttttcatcgattttttccattctcatgggacaacgcccctttctattgggctatttaaatagcctgcacagtatcctactctttgctttaccataccagtatcggacacaacattcaagtatcaaaccatttccattcaaaaaaagataataatttcgtttgctactaaaaaagtcgaggtatccacctcgactttttttagaatcctgccattaattgtgcttgttgtaattctagtgcgcgcacttcgcgtggtaagaaacgacgaatttcatcttcgttgtaaccaacttgaagtcgtttttcatccaagataattggtcgtcttaatagaccaggattttcttgaacaagatctaataattcattaacagataaatcatcaattttaatatttagttgttggaaaatcttagaacgtgttgaaataatttcttcagtgccgtcctcagtcattcgcaaaatggttttaatttcatttttattgagaggctccgaaaaaatattgcgttctttaaatggaatgttatgttcctttaaccacgcacgagctttacgacaagatgtacaacttggtgaagtatataatgtaaccatatgtctctctcctttaccttttatgagagcggctatgaaataacccatctccgcctcattctctctcttacaagaacttattatacacgaaacaaccagcaaaaactagttaatttccttaatttctaattaaatattaatcttttctattagactaatagtttcgttatgttcaataaaagcgtttcaatccactcatatcacactttgaacttattgtcccttttaaaaggttatccttaccatttaaaaaaaattataccagcgtatcgttctcatgatatttaacttattttttgtaagctaacaacaagacctattctaacctagtctattttaattgtcaaaccctgttcggcaattgtgactggaattgtcgttatcactgttttagcttgtgccaataaagtctctggtgtgacagcttgtggtaaatgcgttagcaataattgtttaacgccgctaatctgtgcaaggttcgctgattgcgtcgtcgtcatgtgcgccatcttccctgtacgatcagccaagaagttagtgtcagtcatcaataaatcagcaccctgacagaactcagctaaccctgggaagtaggcagtatctgctgtaaagactaaaaccttgccggttgtttcttcttcaattcgaacggcaaaggctggtactggatgctcagtccgcttaaacgtgactttcaatggtccgagttgcaacgtagtatcttcttgataaccaaaaccttgcgttacatttggtagggttaggctaccaaagtgcaatggatcttgtaaatgcccataaattggcaatatgggttctttcttttgacctgcttgtagttgccagtaatattgtaaaacgccgacatctgcgatgtgatcatggtgataatgcgtcaacaagacggcatctaattggagtggatcaagttctttttcgagtgccaagagtgcgccgctcccgcaatcgagtaataaatgataatcgccactcgttaagagataactacttgtgccgacccccgcgtatggataaccgccataataacctaaaactgttaattccattttaatgaaccacctttctatcttcctctatagtagctcactagccaattatattgcacccttgtttttaaatatttagcgttttttaagcatcaaaaaaggattggcatgttagccaatccttctttactattgaataatttgaatgcgttgttgcttaatatcttggtaaaaggccgtcacactgacgattaaatatggatagaaccagatgaaaccgatgccggccgtcaagtagactaacaattcccagccaatgaatgataaccctaatcctaataatttcaaccagtgcccttttaagataagtactgacaaggatagtagcatccgcattgaaacctgtggaaaatcaaatttgatcaacactaagatttgatagtacatcaaaattaatggttgcaagaaggtgattgctagaatcaccaacaagaatgccaaaacagtcgtatattgttttggattctgactaatctgcataatataaggtgccattgatgtgatgccattatacgtataacggaaaacccgttgccagctgattaactggtgaaatggtgctaaaccaataaatgttaatgcccaatttaataattgttgaatgaagtttaagataatcagatgcgtataaaacggtggtcggaacaatactaatgtatcgctgagacgcgtttcttttttgattgttaatttatacgccgctaagaaaacagcgtttaaaaagacaaaataaaataaatagttggcaaacgtatttaacatttgataaccaaatgaatttgtctcgaataagctttgcaacagcgtatcggtccccatttcgactaatagccagataatcactaaggttgccatcatctgccagtggccttttaatagttgccgcgcagttgcacgataagttcttaattgcaaaaatttttcctccgagcttaatatagtgcatcgtcatttaacggtatattgacgatgcgattgtagatttcggcagttaccagatagaacacaaaataaatcataatgaaaatgccgcacacaatatagactaattgtaacccaggattatccaaaaacaaactcaataatcgaatcgcaaaaatcgcgtgcaaggtccccagaataatcggcaataaaaagataatcagaatttggaaataaatcgtgcgtttgatttccgaataagtcatgccaattcgttttaaggttttatactgcaaaatttcctcttgggcttccgataattgtttcaacataatgatactcccagtcgccaacataaacgtcaatgcgataaataaggcgatgtacatataaaagccaaagttggcattcgcacggtcctgattaggcttgcgtaataataaatcagcacggacaaaaccacttcgttcttctttagtcgtcactcgatagcgtttaaagccattctcatttctaacagctgttagatagctccgttttttcgtatcttgtgaaagcttaaaaaacgacttcatcagttttttatcgcgtcgttgcttaggcgttagatcaagcgcatagacatggtcaatagtagccggcttgatttgatcgtaatattgatctggcacagcaaccatattcagtgagccgtaaaaattaaccgatacgccatttggaaataaccgccgaagatgaataatgcggagctgtggtaactccggttgcttaatctgcagaggaattccttgttgattggcatgcgctaaccgtttatgatgtggcatcttaatcatcgttagcggtaaatcaatcatcgcaatcgcctcattaggccgtaatggcgttgctggaagcttaaattgtcgagccatcaacgcattatatcgcgataatggtaaaacgccagtagcaccagcaagcgtcattgaatcacttaacaagggcgttgccagttcaaattgggcatcgacaattttataggtagtctctgtgatttttttcggtgtaacctgatgcgcccgtaaaatttgttcgacaccttttttttgatatttagaataaataatatctgcgggaatattttcacgcaatgtcttttggctaaatgtatagatcatcgctgcgctccccaacgctgtaatcgtcacagcgcttagaatggtaatcatccacaatgttttcgcatttttcttaaaccgatagctcagattcgtcacactcaataaatgtgtgccccgataatagagtcgtttccaatggcgttcaattcggagccaaatctgcgtatacgcttggaaaaaggcaagtgtcccgatgacttcaaaccacaaaatggcacccaaataccccgcatcaataccatagccataacgccgttcaagttcgggcatcagcactaaaatacgttccgctaaataataaccactgataatcagcataacacctattaaaccccaaatcgtcgtcaaccaattaggtctgcgcgtcttgcggctaaattcggtagggtgtaataaatcgaccagttgatagcgaaaaattaaactactatttaataggccagttaataagaacagcaaaccgaaagtaatcgtcgtctgcttaatagctccccaggagattaaaaacgggattgcgacactgatgcccatcatccgtaatagtaacatcccaaataactttgataaaaagattccgaaaaacagaccaatcaacagtgcaatcgttccgattactaaactttcggcgaagaataccacactaatctgcagacgcgtaacacctatcacacttagcattccgatttcttgccgccgtttcttcataaaaaatagattggcatacgctaggaaaaaggccgcaaataaaatgataatgatgctggcaatttgaatcgtcccaccaaaaattaagcgttcacccgccgattttagtttagacaacactggatcagttttgatagctgtaaaacaaaagtaaacaacaatcgccataatacaggccatcaaatacgcagcgtaatcgcgggcccgattaatggtacttctaacgaggagtcgtaacagcattgtagcgacctcccccaccaattgtcgcctgcatatcaatgatttgattaaagaattgttgtcgatcaccactgcggacaatctcagaaaagagctgaccgtctttgatgaagagaatccgccggcaataacttgccgtaaacgcatcatgcgttactaataggatcgtcgtcttctcctgatgattaatttccgttaaataccgtaaaagttcggttgccgattttgaatccaagctccctgttggttcatcagccaacaataaagtaggattggtaatcatcgcccgaccacacgcgacccgttgccgttgcccgattgagatttcatctggatagcggtctaataggcccccaatcccgagaacttgtgtcacttgggcgagtcgcttttcgattaaggcgacgctcatcttatctaacgctaacggtaacaaaatattttccctaaccgtcagcgaatccaataaattaaagtcctgaaaaataaagcctaaatcatgtcgtctaaaattggctaacttagcctcacgcattttcgtcacaacttgatttttgatcattacttgcccatgtgttggccgatcaatcgtcgcaatcatatttaaaagcgtcgttttaccagcaccagaaggtcccatgatgccgacgaactccccttcttcaatctcaaaggaaatattatttaacgcattcaccagattaaaccgatggccataaactttagaaacttgttgaacggctaccactgtcattttgtcacactcccgaattaacttgctttacattttagcagagttttaccaaaaaacccatttaatcagaccttagttggttgtcttttaacttaaaaatcggtactatgaacttaattatgtctgaggagcgcttattatgtttgaaattatgattgttgaagatgatcctacaattgctaacttgattgctgaaaacttagagaaatggcagttaaaagccattatccccgatgatttcgataccatttttgaccgttttttaacggataaaccccacttagtcctactagatattaatttacccgtctatgacggtttctattggtgtcgtaaaattcgtgaagtttctaaagtgccgattatcttcatctctagccgcagtactaatatggatatggtgatgtcaatgaacatgggtggcgatgattttgttaacaagcccttttcaatggaagtcttaatcgctaaaatcaatgcacttttacgccggacctataactatgtcgatcaaaatacagacgtcatcgaacataacggccttctaattaacttacaaagtggtggggctcaagttggtgatactgtcgttgacctctctaaaaatgaatataagttactccaatttttgatgcgccaacacggtcaaattgtcagtcgcgaaaaactcctacgggcgttatgggacgacgaacgttttgtcgatgacaatacattaaccgtcaatatcaatcggctgcgtaaaaaaatcgaacaagccggtctagaagactatattcaaactaaaatcggccaaggctacatcatcccataaggagtaattatgacctttaaaaaatttattcgtgatcatctatttcacatcgtattcttctttggtggcatgtttgtcttagacatcgtcttatggctagatccccatatgcgcctggccaaagaaaccttgatgtacctcgatttcctattaacgattttcttttgcgccttcttgattggcctttacctctaccatcgtaaatggtttcgaacaattcaaatccgcctcaacgctaaagaagatgccctcaattggccactaaccggcgctacttcggctgaaaaacagtactttcaaaaatacgttaattcgctattagactatcatcaacaaagcatcgaacgtttgatgcacgctcaacaagatcaaaaagacttcattgacggctgggttcatgaaagcaaagtgccacttgctgcaacgcaattgttggttgaatcgattgaagatcaaatcccagaggagaaatttaatcaactgaccgacgagctcgtacaaatcgaacactacgtcgaacaagttctctattattctcgtcttgatagtttctctaaagactacttggtccaagaatatactttgaaaccccttatcaaccaaacaattcgtcaaaatcgaaactattttatccaaaaccggattcaattcaaattaactggtgaggagcaaactgtactgacagatgcaaaatggttagtcttcatcctgaatcaaatcgtctccaatgctttgaaatacacgcctcaaaacgggcaaattacaattgatttggcgcatgatgaacaaggcgtctggcttagtgtcagcgattctggtatcggtattcccgctgaagatttaccgcgcgtcttcgataaaggcttcactgggcaaaatgggcgtcaatccaatcagcgctcaactggcctaggcctctatcttgctaaatcgctaagtaacaagcttggccacgaactttatgccagctcaacgcccggaaatggtgcgactttcaaattactctttccctttttaagttactataatgatccagacggtgaacgtttgatgggcaaagaaaatcattttagataaatataatcggctagttcccctttttgaaggtggtactagccgatttttttattcactgactcatgcaactgttataataagcacattaaccagcgaaaggaaccaacgcatgcgcaaaacaatcatcttaaccctcgcttcactactcttgcttaccggctgtggtgttcaagctaaaaaaacgacccaatcaaccaaaagtacgaaagaagcaaccatcactaacgtcaaaccaaccacagaaaaaatcatccaaggtgccactcaaacttggaccttcggcaaaagggttggttcacaacaaacaaccaaaggtgtgtctgagcaattaaccatctcgccgaccaccagaagcgatgcccaaattaactggacaaccggccaaggtcaaatttctggtaatacagtggtctacaatcaagtatcgtttaaaacctggtctcggaaaacacgacaaagcgttactaaagaaggtcaagatgatcttcactttatgtcggtcactcaaattaaccagacactcaaaaaattaggtgccaatttcaaaatcggtagtttaaatgatctgatttatctagaaacaaagactaaaacgatggttcttcctgaagcggtcattgtcaaagacgaccacctatacactattaatatcgaatacattacgactgatcacacccaaaccctagaacgtggtgaagtcttcaatagtaccgcaacccaacaaaaaacaacgcaagtccccttaacgcagttaaatggtacttggactgcagccggcacaacggccagcgctaacgatagcggcaaagtactcgtcaaagacggctacctctatcaacaacgctatgacagttatgaacgctccgcaattcaatcgctggcttccgaatcggcagccacccttagaaaaagcgcgatgttcaccgatcagcaaagttctgcagccaaagctggctaccaactcactggtaaatcagttgccagtggcgatagtattgggtacctctacctctttgttaacaatcaaaaattagttcgtattggcgaaggtcttgcgaccgactaccaaaaaacaagcgaccaagtctctgaaaaagagttaccgcaacaaagtatcacgattttcaagcagatggatgataaatatcctggcgaggttgcttcaacaatcaccactaaagcggatgctccaatcgtcggtatgagcgctagtatcaactatttgacggatgttactgccggtcaaattacggaaaataaatcagttacaaactaaaaaaaggaagacgctaagcgtcttccttttttattaggcagcttcttgttgttcacgggctgcttcttcttttaatgccattgatgtggcaatcttgataaatggcaagtagataatcgttgaaacgagtaagttaactgcggctaaaaccccgccttgccaactaacagttgccataatcccaccgataattggtggtgttacccaaggtggcatgatggttgctgctggcactaaccctgtgctcgttgcaaagtaagcaattgtcactaagaccattggtgtcacaatatatggaatgaatagaattggatttaatacaattggtaagccgaaagttaatggttcgttgatattgaaaacgccaggtgcggcacttaagttaccaacaatcatgtattgtttgttcttacggccaactaaccagatagcgaaaattaaacctaatgttgcacctgtaccacccaagttaacaaatgaatcaaagaatggtttgttaacgatgtaaggggccactttaccagctttaatcgctgtgatgttagctgtaatagcaggtgcattgattgtttgcatgaatggttcgatcatgttggcaccatgtaacccgaagaaccataagaatggtgtaatgaatgctaataataaagctgaaggatagctgtttgcaagcccttggaatggttcttgaacggctttgtagaatgatgtcacgatattttcaataccaaaacctaataaaattgttgccaataatgcaaaaatagaaatggtaatcattgatggtaataaagcagcaaatgacttagcaactgcaggtggtaccccatcaggcatcttgattactaagtgtttgttacctaataagcgtctgaggatttcagttgaaatcattgcgacaattaaggccacgaataagcccattgaatccatgccagccaagccaccaacagcaaagaaagaacctaatgctgtgacgcctgatgctagcggattaacatcgtaagacttacctaagttataggcaactaggaaaacgatgaagacagacaaaatagcaaatgtcccgctccaagcgttccccccaaatttagtccaaatgtaagctttgtccgcgccggtaccaactgtctttgagaaaacactattcataaaattggtatatgccggaattggtaagttattgagtaaggtcgcaaaagcacctaaaatcatcaacggcattgttgtcacaaaggcatcccgaatggcaattagatgtctttggttcccaactttagcagcaactggtaagaatcgtttctccatgaaactgataaatgaatccataaatctcactccctgtcctgttatttaaaagcctatataattgctattacaagtattatcataacggcttatgtaagcgttgtcaaatgatagccatactaaaaagcttaaattaggaaggttttcactaataaccaaaagaagcaccaactcacttaaatcctgagtgatgcttcttttttaatttatacggtatataccattctcttaaaataaaatgttatttttttattagtgatgcatcgttaatggactaatttatcccaaataacgggcttaccagcaaccaatgatttcggtacatcgataatacgttggttactgctgcctctaaattgtaaggttaaatccatcttatcttgcataaagcgaccgtccactagaatatcgatttgcgataacaattccagtttatcgggtgactcgagcattaattcttcccaagtataacccgtccacgaccaaacgtccttagtctgtccgtaggtttcatggatgcgatcaaccaatgacaggcacgtttttgtatttaagaaaggttcgccccccagtaacgtcaacccttgaacatacggttggccaagatcatcaatgatttggtcctccagttctttggtgtagggccggccatatttaaaattctgggcaattcggttgtaacaacctgggcaggcaaataaacagccactaacatacaaactacaacggacaccttcaccatcaacaaaattaaatggtttgtaatccgcaatataatcctgactaagttcttcagacaaccattcttgtggtgctgggttcttaggcccgcgtttcgtatttcccattgaacaaactcctcaactcaaaatcgtttattgtcttgcaacgttattattatcattaccaatcgtgatgtgcatatgtttgacacgacttgaaatttccttatgacggccgtgaaccattggccgttgttgtgggttacctaaataaccacaagtccgtttaacaacgtcacacgttgctggatctgtgttcccacattgtgggcattggaagccccgttcagttggtttaaagtcacccttaaagccacacttgaaacattgatcaattggcgtattggtgcctaaatagccaacacggtcataagcgtaatcccaaacagcttctagtgccttaggattttgacgtagatttggatattcacaatagtgaataaagccaccggcacaatatttaggataatctttttcgaagtctaacttttcaaatggggttggcgccttgcgaacatcataatggaaactatttgtgtagtattccttgtccgtaatgttttcgacaatcccaaatttttgcgtgtctttttgacagaaagtattcgttaaactttcagcaggtgtgctataaactgagaaatgataaccatattctttttcccaatcaacacaatggttatagaggtccttaaccacgtctaacgtgaattgcttagcagttgcatccttttcccaatctgggccaaagaaggctgcaccgacttcatagaggccaatatagcccaatgaaactgttgcgcgtgaattcttgaaaacttcatcaacactgtccgttttcttcaagcgtttgccaaaagcaccgtaacgataaagaattggggcgttttcaggtttagcttccttagcacgttccactttgaagacgagggcttccttgcagaccttcaagcgttgttctaaaatttcccagaacttagcttggtcaccagcagcttcaagcgcaatccgtggcaagttaactgttacaacacccaagttcatacggccactgttgacctcttgtccttgttcgtttttccagccttgtaagaaactccgacaacccattggtgccttaaatgaacctgttaattcaactaacttgtcatacattaaaacgtcagggtacatccgcttagttgcacattcaacagctagttgtttaatatcatagtttggatcagttggggctaagtttaaaccgcgtttaacagcaaaaacgagtttagggaaaatagccgttctcttttccttacctaaaccttcaattctaatttctaagattgctttttgaatggcacgttccatccaacttgtccctaaaccaaagccaagtgtcgtgaatggtgtttggccttgtgatgaatataaagtattgatttcatattccaatgcttgcatcgcatcataaatatctttttcagtcttagtttgtgcgtaagctgtttgtttggcttcgccatcaatccagtttttagcatcagttaaatgcttatcatagttcttctgtgcaaaaggtgccaataattcatcaactcgatcagctgaacagccaccatattggctagaagcaacgttggcaatgatttgtgacatttgtgccgtagctgtttgaattgaatgtggtgcttcaacttcggcgttcccaatcttaaagccatgattcaacatttctttaaaatcgattaaacaacagttcgtcattggactgtatggttggtaatccaaatcgtgccagtgaatttcaccttttagatgcgcattggcaaccttaggtggcaacatcttaaggcccattgccttagcgacggtgccggccgttaagtcccgttgtgtgttaaacacttggctatccttattggcattttcattgactacggtttgatccttagccaataatttttgaatcgtaaagttaatatcagttgctttattgcgggcaaaatcccgttgtgtccgataattaatatattcctgggcgatgtcatattgatgatgttctaatagtttgtgttcaacaatattttgaatttcatagattttaacgtctttatcaaaccgcgcaccgacttcgctcacgacgtcggttgccactgaatttaaaatttgataatcaagtggttctaattcatccttaacgtttttagcagctttaatgactgcttgttcaattttatccgctgaaaagggtaaaatacgtccgtcacgtttgacgactttaatctctaaatccatttttgggtcttgttcttcacgtatttccaacattgcaccagtctccttaaaaaaatcactatccccatcatagacgaattcaagatgccaagcaactatatatagtgtattagacattaaaaaaggcgtataccaactgtatgtcgtatacgccaattgtgcacaattttttctttcccgcgcccttatcaggattagcctgacgaggttcaaaaaaggattgacaagtttgcttaattttttaattttaatgtcatcgcattaattgccacgacaattgttgaaagcgacatcaagatggcaccaatcgctggacttaaaattaagccccaagcggcaaataagccacccgccaatggaattgctaaaatgttgtaaccagctccccaccaaaggttttgcgtcatcttccgactagtagcatgtgctaaattcaagaaatgcatgatatcgttcggattactcttaaccaaaatcacatctgcggaatcaattgcgacatccgtgcccgcaccaatcgcaatcccaatatcagctcgcgtcaagctaggggcatcgttgacaccatcgccaaccatcaagaccacttcaccctttgcttggtaatcttgtacaagtgcttccttatcttctggcttcaaattggcttgaactgtcataccacccaattgttgcgccaccttttcggcaacctgttgattatccccagtcaacatcaccggttggatatgacgctttttcaatgccttgatgaacgtcagtgcttctggtttcaactgatccccttgcgcgaccaatcctaagacagtttgaccttgaattagataactaatggaattacctttagccgccaaagtttcaaaggctgccgtatcaaatgcgatttgcttttcttgtagataatcggccgtaacgatttgataagtttgcccttcaattgcgcctgtcagcccgattccttgaatcgtttgtacattttcagcttgggacatcgtaattttttcagcgtcattataagctaaaatcccagttgccaatggatgacttgagtgtcgttccaaagcacccatataagccatcaattgagtttttgacatctcgccagttggttgaaccgcattgaccttaaaagccccttgcgtcaatgtccctgttttatccattaaaaccatcgtaatttgatctgccacttcaattgcttggcgattacgaattaataagccgttagttgccgcaatcgctgtacttcgagcaacaactagtggaatcgctaaaccaagtgcatgtggacaagcgatgatgaagaccgtcaccattcgttcaaacgcagtatttaaatcagctaagaaaaaccaactgataaaagcaataataccagccactaacgctgcgtagaaaaggtatttagcgaccttatcggccaaaccttcgacctttgacttttcttgttgtgcttgtttgattaacttcatcacctgcgctaaataaccactctcaccagtccccgtgactttaacggttaatgtcccgtcgccattgactgttccaccaattacttggtcgccagtctttttagcaactgctttggcttcaccagtcaccaatgattcgttcacctgactttgaccattcaccacaagaccatccgctgggactttttcgcctgctgccaccaacacggtttggccctcttgtaaatccttcaaatcaacagcgtgttgctgaccatcttgatcgaggacttgtgcttggccaggtaataaggcggccatcttctccatcgcactcccagcgctcataacggcgttcatttcaatccagtgacctaacaacatgataacgattaacgttgccagttcccagaaaaaatccatcacgtgcgtttgtgttgccaagaaatggttggcaataaaagcatataaactataaccgtacgataccgtaatccccatcgcaatcaacgtcatcatcgctgggttcttctcggccaattcgctctttgcaccttttaagaaaggcgcgccgccgtaaaagaataggaaggttgctaataagaggactaaccaatccgatcctgggaacgtggtttgaaacggtaatttaattcccataaaaggcgataatataataatgggaattgttgcgactaatgagacccagaatttctgtttcaaattacccatgtgcatcatatgtccaccatgcatcatcatatcgccgtgatcatggtccatatcatgcatatcgtgcatgtccatttcccccatctcatgatcgtgcatcttcatatcatcgtgtttcatcgttattcctccttttcacagtcgcatttatttggcaaacagtcgcaagccactttttctggtgcagtagctgctttggctgtcagtaattgttgtaaccgcaaaatatccgtctgactcaaagtcgtttgatcaattaaagcggctaatgtctgcccttttttcatgccacacaagtgctcaaaaagactttgtgtggcattttccatcgcttcaatctcaggaacggttgctgtgtaattaaaccgccgcccttccttttctgtttttaagaagccttttttaaccaagcggccaatcaatgttttgatggttgaatcttgccaatcgcgcttttgttgaagtaaatcaatcaagtcacgactgttgacttgaccaagtgaccagacaatgcgcatcacttcccattcggaagtcgtaatttcatttgtattttctgccatcttgctcacactctttcgtttacatttgtaattatatattcagtttacaatcaagaagcacttctgtcaatcattaatacttttgcgtacaaaaaagggtgttaagacaaaattacttttgtcttaacaccctttaaaaagtttaagcctaacgatctttcataaaatcttcgactaatttttgattttcttcgttgcttgtattgacgttaacagctgtttcaactaaatcagttaattcagttgtatctaaacgtttcatcaaactacgaactcgtaacacagaagttgcactcattgagaattcatctaagcccatcccgacaaggagtggtgccatgattgaatctccggcagcttccccacacataccagtccacttaccttctttatgagaagcgtcaatgacgttcttaataagacgtaagattgctggattataaggttggtaaaggtatgaaacacgttcgttcatccgatcagcagccattgtgtattgaatcaagtcgttcgtcccgatactgaagaaatcgacttctttagcaaattggttagccaatacggcgctggctggaatttcaaccatcatcccaacttgtaaatcgtcagatacagtttgacctgcagcaattaattttgctttttcatcttcgagaatccctttagcttgacggaattcagcaacagttgcgatcattgggaacatgatccgtaacttaccatagttagaagcacgtaataaggcgcgcaattgtgttctgaaaatatcatcacgatctaaactaatccgaattgctcggtagcctaagaacggattcatttcttctggtaatggtaagtaaggtaatttcttatctccaccaatatccattgtccgcacaacaactggtttgccgtccataccttctagaactgatttataagcttcgaactggtcatcttcactaggtaactcagctgaatccatatataagaattctgtccgatataaaccgattgcttcagagccattttcaagaacaccagctaaatctttaggtgttccgatattagcagcaaccgtaaatgttttgccgtctttagtgacagacttttcattctttagtttttcccattctgctttttgatcagcaaaggcttgggccttcacatcatattcagcaatatcagcatctgtaggatctaaaacaacatcaccgttaataccatcgacaattaataagtcgccagctttaacatcttgtgtgactgtttcagtcccaacaattgcagggatttctaaagaacgtgccataatggcagaatgtgacgtccgaccaccaacatcagttacaaaagccttaacgaatttaccgtttaattgggctgtgtcactaggtgtcaagtcatgagcaatcacaattacttcttcatcaattaatgctgggttagggagtgttacccctaataaatgactgagaactcgcttcgtaacatctttgatgtcagcagcacgttcttgcatgtatgcgttattagtcatagactcaaaagtggccacgaataaatccgcgacctctttcaacgcttgctcagcattaaccttgtcatcattgattttaccttcgatagcgccggtaaattctgggtctgctaaaatcatcatgtgagcgtcaaaaacttgtgcttcttcttctcctaatgattcagcagcaatcttccgaatggtctctagatcactcgtagaatcttgtaaggccttatgcaaacgattaatctctttttctgaatctgaaatagttgatttcgaaaatgacaaatcgggttgcactaacatgtaggctttcgcagtagcgataccatcactggcagcaatccctcttagtttagtcattattcagataaaccttcctttttcattgtttcttcgattgcgttgattgcgtctgcttcatcagcaccttcagcagaaattgtaacgtctgcgccttggccaacaccaagtgacataacgcccatgattgatttcaagtttacagatttacctttgtattctaagttgacatctgagttaaatttgcttgctgtttgtaccaataatgtagctggacgagcgtggatacctgtgtctgctactacgtgaaaatcgcgtttttccatgttaatcgatccccttttatctaattatagatttattttggccgaaataagtagtcactgatggtgtctaccctttcgaatattaagattaccattttttaaaaaatactacaacagtttcgctaacaaaattaatggtagtctacactatgccgctttcagcacagcggtaaatcacctgcccatttcgttgggcagcgcctacaatttcttttcgatggtcgtaattgacccatactttctgaaagtctaaaaactcatcatgttcaacgacaatggtttctttttcgtgatttaacaaggcatccatctccgttaaaaaatctcttgccatctgaatcactcctttatcacgtctagataattatttttaatgaccctcttttcatttattaagtagcgtcactgcctccaattgtacgcaattttgacccacaaataaagttttattttcgagttcgattacttgcaactttttttagagatgattataatttatttaaggtcaaagatagtcaaacaaactttgacgttacatttaataggcgaaaggttgtgacagattaaatgctttgtcaaaattgtcaaaaaaatccagcaacaatccatctctacactagcgtcaatggtcaaaaccaagccattaacctttgtcaaaactgttatcaagcactaaagcaacaaggaatgagtggtcaatataatgatccctttggttttagtaatcttgatgaactcttcaatgcaatcaacaatccaaacgctgaacgcaatgctgctaaccaaggcccccaaacacaaggtggccgtaatggcggcggtaacaacggtcaaaatggtgaaagtctactcagccaatttggtgtgaacctcaccaaccttgctaagggtggtcaaattgatccggtgattggtcgcgataaggaaatcgcgcgcgtcatcgaaattctcaatcggcgcaccaagaataatccagtcttaattggtgaagccggcgttggtaaaacagccgttgtcgaaggtttagcgcaaaaaattgccgatggcgacgttcctgctaaattaaaggatcgccaagtgattcgcttggatgtcgtttcattagtacaagggactggtattcgcggtcaatttgaagaacggatgcaacagttgatcacagagctcaaacaaaataagcaaattatcctctttatcgatgaaatccacgaaatcgttggcgctggcaatgctgaaggtggcatggacgccggtaatgtattgaaacccgctcttgcgcgtggcgaattacaactcgttggcgccacaactaataatgaattccgtcagattgaaaaagacgcagcccttgcacgtcgtcttcaaccggttgcggtcaacgaaccatctgttgacgaaaccgtcctaattctcaaaggacttcaagataagtacgaaagttatcaccacgttcactatacggacgaggcgcttaaagcagcagcggccctttctagtcgttatatccaagatcgttatttgcctgataaggctatcgaccttttggatgaagcaggttctaagaaaaacttgacgattaccttgatggatcctaaggaattagaagccaagattaaatctgcagaagcacaaaaacaagaagccctcaagcaagaagattacgaaaaagcagctacttatcgtgatcaagtcacacagctctctgaaatgaaagctaataattcagttgaaaaatcccaagaaccaacaatcaccgaaaaggatatggaaaaaattgtcgaagaaaaaacccatattccagttggcgaattaaaggcgcaagaacaagctcaacttaaaaacttagcgcaagatcttgaagcacgtgtcattggtcaagataccgcagttgataaagtcgctcgttcaattcgtcgtagtcgaattggctttaataaatccggccgaccaattggctccttcctctttgttggcccaaccggggttggtaaaacggaattagccaaacaaattgccaaagaactctttggcagtaccgatgcgatgattcgctttgatatgagtgaatacatggagaaattcagtgtgtcaaaattgattggttcacctcctggctacgttggttatgaagaagccgggcaattaacggaacaagttcgtcgtaacccttatagtttgattcttttggatgaaatcgaaaaggctcaccctgacgttatgcacatgttcttacaaattctagatgacggtcgtctaaccgattcacaaggtcggactgtcagcttcaaagacacaatcattatcatgacgtctaacgctgggcaaactgatgctgaggctaacgttggtttcggtgcagctgtcgctggccaaacccattcaattctcgatcagttaacgaactactttaaaccagaattcttaaatcgtttcgacgatattattgaattccaaccattaagtaaagataatctattgaagattgtcagcttaatgcttgatcaaactaacgcgatgattgccgatcaaggcctccacattgctgtgacggatgacgctaaatctaaattagtcgatttgggttacaaccctgaaatgggcgctcggccactacgtcgtgtcattcaagaacaaattgaagaccgcgttgccgattattatttagatcatccagaacataagcaattaaaagcgcagttaaatgatgatcagattcaaattgtgcaaggataatatcgaatattaagatttattatcatattttaagattaaatccgtgttatataaaccgctttcagttatactattagtaggacttaaatgattagggagtgattagtatgagactcattaatattacaaattcttatcaccgtttagtaacacaacaattagcaaccactaaagccgactatgtgagcgtctattcgcttggcaaaacaacagtccttttcacccgctcatctaaaacgcgtgaaattcttctaaaaaatgacaagcgacatattcaacaagctgaaattgattttgtactcaaggaattagtagatgttgattcaaccgacgatgttgaaatcctaaacgatggctcattagttgagattaccattccaaccccttctactaccgcctcttagacggttgaaagcaggccactaccgataactttggtagtggctttttgtgtgcaatcaaaataatagcaattcgatatggcgtatcgtataatacccattaagcttattgagggaggattttacgatgcaaactgttcaaaaagggcaacaaattatttgtcgtttagaagttggcgatgaactcatcaccgaattgaaatatttagccgctactttaccggaccaattaggtgccatctcaggaattggtgcctgcaatgatgttactgtcagtgtttactcaccagacagcgacagctacgttgaaacgcgcagccaagaacaggttgaactcctatcactgagtggtaacgttgaaaatgcggatggtaagatttcaactcacttgcacgccagttttgcccgcttagacacaagcgtttttggcggccatcttgaacgcgccgttatttcaagaactggcgaactcgtcatctcaatcgtcccccttgctgttgggcgtatcttgcatcaaccaacccaattacaagtactcgatttatcataaaagatgattaaaagggattaaggcaaataaaatttttgccctaatccctttttttgctagccaaattagtaagcggataatgatgccctctaaggtgcacgctttttatttaaaattctagccaaattagtaacgattataaaccactctttttctaatttatgatagactagtattaagtaaataacgttccacgaggagtccgtatgaattttattaacctgattcaatcgttatttagacggcggccaaagcgcccaaccattcaaccagagacgcactttaatcaagctactcctgaaccagaaaacacaaatcaattcttcgagacagctgatgaatttgaaaaagaaccccaagcgcagcaaactgaacattttgtcacaacacctgtccaaccacgcaaaagttcagtgacgatccactacctcaaccaaaatcgaattccactgcggccttcgattacactttctggagtagttggcgctacgcttgatttaccgtggttaaaatttcctggctactatttagccgaaattacaaatttaaaacaacatttccatgaagaccccactaacatttggcttttttataaaccccaattagcggcaccagtcatggtacttcatcaagacctagaaggtggtttgctgatcaaaccccaatttttacttggcgctttgaatgaacactatcaagctaacccgttagaaggcggtgtgaacttcatctatcgaacttctagtaatcaaactggacgttttagtgctgaaacgcagctagtacggttccaatatgatccacttaatctaaaatacagcgatgcccctgatcaaccgtttattgaattaaccgcatcggttgacacttacaaacggccgacagaagaaacactcacaacgacccgcttacctaagaatgcaatttggaaaatttatagttgtgcaacagctacttctggtcaacaatggttcaacctcggtagtttttggatttcacccaagcattatgaactccatgcaactaaccctaaggcaacggtcgattaccaagtccccaagtttaccaatcaatatacgattattgaaaccacaccgcttaatttagatgcgactttgaataacacaacggcaacgttatgggccgcgccttacgaaaaaccggctacctattgccttgctttgaagactcgcgtgcacgtcaagcaagtgattgcgctcgacaatctcagtcggtggtgtgaacttgaaggtgggcagtggctattagaatcactactaacatttgactaaaaaaacatttttcaacgctatataaaaagaggtcttctgacaaaatcgattttgtcagaagacctctttttgattgtttaaaaacgttctttgccactaggaatgcatgctcttataatttagctgttaatttaacttctgggtacttatcttggaaccagcgttctgcaaatttattttcaaataagaagagtggttggtcgtgaatatcttttacaagtaagttccgtgatgatgacatactttgatctaatttttcaggatcaatccaacgagctgttcgtgagccgattggttccataatcacttcagaattatattcatgttgcatccgatattggaaaacttcaaattgtaattgaccaacagcacctagaatatagtcgcttgttgtgtatgtcttgtacaattggatggccccttcttgaaccaattgttgaatccctttatggaatgatttttgcttcattacgtttttagcagtgacgcgcataaataattctggtgtaaattgtgggagtttttcaaatgagattgcttctttaccagtatgaatcgtatcaccgatttggaagttccctgtatcatacaacccgacaatatcaccggcaaccgcactcgttacttgttcacgagcatcagccataaattcagttgagttattcaaccgcatcttcttaccagtccgcgtcaacgtcacgtcaatcccgcgttggaattcacctgaacaaacccgtacaaaggcaattcgatcacgatgggctggattcatgttagcttgaatcttgaagatgaaccctgagaaatcttcattcgttggttcaacttgtgtttcttcttgtgtttgatgagcttctggtgctggtgccatatcaacaaaggcttctaagaaagtcttaacgccaaagtttgttaaggctgaaccaaagaagattggtgtttgatcaccagtagcaattttagcgggatcgtaagcattacccgcttcaccgattaattcgatgtcatctagtgcttgtgtgtaaacagaatcttccttcaaaggattatcgccagcaatcttgccttcttcatctaaagcaagataaggattggcttcatcttctggacgatacatttcgattcgtttgttagcaatatcgtataggccacgtaaatctttacccatcccgattggccagttcatagcacaaccttcgatatccaataattcttctaattcagcaattaaatcgagtggttcgcgaccatcacgatccaatttattcatgaatgtgaaaattggaataccacgcatcttgcagactttaaataatttcttagtttggggttcgatccctttagcggaatcaatcaccatgacagcggcatccaccgccatcaatgtccggtaagtatcttctgagaaatcctcatgccctggcgtatctaagatgttaatccgtttgccagcgtaatcgaactgcatcacagaacttgtaacggaaatcccacgttgcttttcaatatccatccagtcagatttcgcaaactggccactcttcttccctttaacggttccggcttgacgaatcacgcccccgaataataagagttgttcagtaattgttgttttcccagcatccggatgggaaataattgcaaaagtccgccggcgttcaacagccgtttttaattcagttggtgtcattgttaaatcctctctttagtgccaaagtcattaggcctcagacgcatcatcttttgcagcgaccgtcgttggtaatgttagtttcaaatctaataaacgtgaaccgactaccgaaccagttgttaaaacaatgccgttcggtaaatcgattgattctggatgaccactgacaggaattgcaccaatctcagtaatcataaacccagcaatcgtatcaacatcagcgatttgaatatccgtctgaaaggcatcgttaaattcattaattggcatccggcccattactttgtagtgggtctcgtcaatcttctgatacaacacatccgccttatcggattcatcttcaatctcgccaacaatctcttctaataaatcttcaattgtgactagcccaacaacgccaccatattcatctaacaagatggccatctggagttgggtgcgtttcatttcgaataataagtcatcaatcacgattgtttcaggcacaaacaaggggtctttcatgactgtttccaattgtgtttctgagaagcccttctcacgtgcttctcttagtagattcttgatgtggacaatccctacaatttgatctttatcatcccgataaactgggattcgtgaaaatggttgtgctaaaatagcatcaatattttggtcattgtccgcacagatatccaccatgaaggcgtccgttctgggaaccatgacctctctggccatcttcttattaagggtaataatcccttctaacatttcgtactcgtcagattctaaaacccctgcacttttccctgattcgatcatatgaaccatctcttcacgggttagtttgggttctgtctcagaaaaatcaattggcgttaacttcatcaaaaccgtcgttgacgctgatagcaaccaaacgaatggtcgcaataaaacgccaatgaagcgaatcggttgaactgccgccttggcaatcgcttctgagcgatgcagggcaacttgtttgggatataattccccaaaaacaagtgagatataggataagacaatcgtcacaattaatacggctgcttccttcgtccaagccgcatttcctaaaaggggtgctaatctacccgcaatggttgtggcagcactcgctgaagataagaaaccagcaaacgtaatggcaacttggatcgttgctaagaaattattggagtggtttaaaacctccactaataagcgcgccttcttatcgccattttctgcttggttctccatcttcgtgcgacttagtgatactagcgcaatttctgccgcggcaaaaaaagcattcactaaggttaaaattaaaatcaacagtaactgtccccacaccggacttccagggtcaggattcatcgtcacatccactacctttcatcttataaattatcgtattgagccgattaagacctactatgcagtatagcatagtcaaaaatggaaattcaacccagtaagagtcgttaaaatcgccttcaaatcagtcttgtgcgattataatttagtcgccttatcgactttagtgcgtaaggcttgaatatcgtataaataaacaacaactgttttggtaacggcataaaacggaattgctaaaatcatccccaaaataccgtagatattgccggcaactaacaagataatgataatcgttaatgggtgaatatctagggaacggccaatcacattagggtaaatcaagttcccatcaatttgttgcacaataactactacgacaatcaccatgattgttttcggaattgaaattgataaactaataattaaagcaggtgcaatcccaatataaggaccaagatatggaataatgttggaaacaccggcgataaagcccaataagtaggcatatggcatcccaataatcaggtaaccaataaaggtgaaaacaccgacgaataaacattctagcgcttgtccgccgatataagctgaaatggttgcacccattttacgtaataaatcagcgacttgatcgttataacgatctggtaacatcttttgaatatttggaatgagtcgatgaccgtcttttaacatataaaagagcatgattggtacggtaaagacaccaatcgtcacactcgtcacggccccaatcatgctgccgaaaccgctggtgaaactcttcatgatgttttcagcaatcttagaaggttttaagtctaattggttaacgtatttattaacatcgatattcttcaaatgcggatttgttgagatcttatcaatcatgtcctgcaagcgatgcacataatctggtagattcgttaccacttgtgtcacttgatggattaattgtggaatcgctaaagccacaatgaagataatcccgccgaaaaagacgatgaaaataatcgcaattgcccattttcgcgatatttttagcttacctagtaaattaatcaacggattaaataggtagaataataaccctgccccaatgattggcccaaacaaggttgaaataaaggtccctattggatcaaataagaaactaattttagtacaaacaaaaattaaaacggccaagattaataattcagttgaccaaaacaacaattttgattgacgcaaacgctcaaacataaacattcctccacttgacttcatcgaaaataacgcccaattgtgctactataaacacaaagattatttttattgtaccaaatttcattgtaaagctacataaattcaaacgattggtggttttttcatgcaaattaaacaaacacgtgatttaacaagtccttactatcaagatggtctcgctattcgccaagcggtttttgtcgctgaacaaaaggtccccgctgaaatggaaatcgatgaatttgaagaccaagcactctatttcacaggttatctagatcaacaacctgttgccacattacgcgtattgaccgagggcgccttctatcacgtgcaacgcgtcgctacaatgaaagcttaccggcaccaagggcttggattagagctaatgcaagcagctgaagcatccgcaaaaaaagccggtcataaaggccttattttaaacgctcaagtcacagccgtcccattttatgaacgcttaggctaccaagcaactgataaggaacgtttcttagacgctggtattttacatcaagaaatgattaagatcatataaaccgttggcattcttacaatctttaacctataataaatattaaagtctgaccctgttttcaaagagaggtttattatgtctaaacaaaaaatatttttcgttaatctatttttcttcgttatcccttatttactagttgttacaattgctgccatcgcttatgacagtttggttgtgcatagcgctacttgggatcgtacaatttttggcggtctcgtcggtggaatcctaatcctctttacaaaagtaccgcttgaacggccactaacaattatgactgaacaaactaagaatcctgttatgcatgctattttgaacttcttcattatcagtcgttcaactgcttataaaattggcaacttcgttttagatttcgtactcttttgcctagcaacgtatctactaagagactttcttcccatccaaattatctctggtagcttactcggttggtgtgttatcgcaatttttgcttcaattagcatcgcaacagccctcggtttcaagacactaacaattcaacaagacacatcggtagaaaacaattagcgtgctagtcaaggcgctttggttttgaacataattttcccaaccatccttcttcaggatggtttttttgtgcgctaatcaactaattttacaagccttttggcaacttgttacacttaatcataaatagctatgaaggagatgagtgccatcaaaacgattgctattatggtagctgctgacgagcaatacgccgatcagatgttactgacacttaaatcgattcgagaacattgtgctttagaaacggctgttgatttatttgtcttgagtagcgacctctcctacgcaactaagtccgccgtcaatcgcttaatgacgctaccccatcatgtctcatttattgccattaatccccgtcgcatcaaaaatttcccaggaaataatcattttgaccaaactgcctattatcgaattctagcaccacaaatcctcctcgccagacatattgagcgagtactctatcttgatctcgacacactcatccgaaccgatttaacgcctttatacgacagtgatttagaggggaatattatcggtgcggtcattgaccctggtaaggcactgaccttaaaaagacttggtgttcctaaatcgcaagccaataatatctattttaatgtcggcgttttgctaattgacacggtactttgggaaagacaccatatcagccagaaaattcttgcgatgctggtgccttatcctggccgccgcgttaatgatattcaagatacgctgaatgtcgttttggcgggacggactaagttattggctcccaagtggaacgttcaaaatgccattttatttaaaacctatgagccaattaataatgagtacagtcaactctttaaacaggcaattacggctcctaaaatcattcacttcaccactgagaaaaacccatgggaagtctttttagagcatccttatatgtccgaatatcaggtctatttatcacaactacctgctgacaaacgtgatcaaatcaatattgtttctgctgctaattctaattttgtgaaacccctcgcgattttatacgcctcaattctgaataataacgatgataaccgccattatgccttttttgttttgagcgatcagctaactgctcgcgatcaggcaaccttgcgccaaatcactgaaagttttaatgccgaattaacctttattgaagttgacgaaacaccactaatggcggtcattcaagatgaacaagttttaaaaactgcttattaccgattactgattcctaatctactacccgagatcgaacgcgtgctctatttagattgtgatacactatgcctcgaaaatctcgcgcgtctgtgggacgttgaattgggtaacataccagtagccgctgttgaagatgccggcttccataatcgattggctcaaatggcaattgactacaagagtattcgctacttcaatgccggtgttttattgatgaacctaaccatctggcgccaacaaaaaataacggaacaaattttgaccttcattaaagaataccctcaaaaattacgatttcacgaccaagatgccttaaatgcgattttacatgatcgttggattcacttacaccccaaatggaacgtccaaactagcattttgatggactttatcgttgcaccgaccgaacggattaaccgtcaatttctaagtgcgcaaaaagaaccgggactcattcatttttgtggctcagaaaaaccctgggataaaagttcaacccatccttatacacctcagtatcgcttttataaaagccgctttttagaaaataacaatccggtgccttttagagcaaacaccacttttgatgaatatcattcttaaaagaaagcaaaaaaagaaggccgcacaatctgtgcggtcttcttttgctattaagactaaatagtgttctaacggtggtgagccaattcttgatatcggttataccagatatcaatatattccttcgaaaatggccctttgccattgttgatccaatctaccaaaactttgacattggctttcaatatccgatcagtttcggcagaatagtgccacttcgcactatgcgcttcatattcatcgacgtctaacaagcgtttctctccgtttggaaagacttttacgtctaaatcatagtcgatatacttcaacgcttcttgatccataacgtgtggcgatgccaaattgcaataatatgaaacgccgccttcgcgaatcatggccacaacgttaaaccaatacttcttatggaaataaataagtgccggctccctcgtgacccactttctgccgtctgattctgtaactaaggtatgatcgttacaaccaatgactgcgttctcgctggtttttaaaaccatcgtgtcgcgccaagtccggtgtaaactcccatcgtgtttataactttgaatcgctatatagtcgccttctttaggtgcattcatcgacctacctggctttccaaggttattattcataatcacctatcattatagcaaagactctcaaaattacctaaaactttctaccgctaaagtgagtcaaatcgttgcgccattttcttttgaaccgttggcattgcaatttctgctagagctgcttttgaataccattcacctgggaaaaaggccaagtcgctgtcttttgcaatcgtcgccgataacaacgtaatcgtccacttcaaatgggtaaaaacgtgcgtcaccggtttgacaggcaccggttttaaatgcgctaatgttaaaccatacgcctctttgaagtaggcttcaattcgagtcatttgctcttctggcgttaataactcagactcatcatcctgtaaatcttctgccatcaccaacggataggtcgttaaattagccagcaaacctgtgctaggtcgcttttggaataaaaagcccttttcagattcaatcacaaccgcaaaaagcgcaaccggttttggtttagccttcttcgttttaaccggataatccaacaacgtgccatcttgataacttctgaaaaatggtgctaattcggtgtccccaaccgttggatttttggctgtacaaacttgcgaaccaaaatccatgaccgcctggttgaaatcgccaggtcggtctttgggaattaacggtaaaatggcgtcgtaaaaaatactacgattcttcggattcgcaatatcagcgtcaatttttaataaccgactgaagacccgaaaagcattcccgtcgattgcgggaaccacttcgccaaaacagatactggcgatggcgcctgctgtatacgggccgatgccggctaatttttctaactcagcagatgtttgcggccatttgccctgatagtcatcaactacttgcttagccgctttttgtaaattacgcgcccgtgaataatagcctagcccttcccaagttttcaagagtaactcttctggggcagctgctaggtcttcaacgtttggaaaagtcgctaaaaagcgttcgtaatacggaatcaccgtttggacttgcgtttgttggagcataatttcagacaaccagacccggtaaggttcttgattttgacgccaaggtaaatcgcgacgatgttcgtcgtaccatgccataaaagcagtctgaaacgcctcacgttcactcggtgtcatctgatacttcttggtcgtcgatgaaacggttgattgcatcaatattaaatcctttccggtaaagtgcttgttgcatcttcatccgccgctcgcgcggttctaataggcgataacggcgccattttttctcgccaagggctgccaatgcatctgcttcactatcactgtcttcttcaagcgctaattcgtcaataatccgacttaaattatcaccaccaaagcccttttgcatcaagccctgtttaatcttttgctgttgttcgaagaacgaactgtggcggtacttcttcgctagcttttgggcagttgctaagccgactgtcacttgttcttcatctgtatataacgtcaatgcttgatcgatatgattagcactaacccctttttgaatcaatttttgtcgaaccactttaggccccttatccgaagtattaatcaccgttctaacataactgtccgcgtaatcctgatcatccaaataatgtagttcgcgtaattttgtcaaactggtttcaatgccttctggcgtaatttcatgatcacacaagtattgtgttaattctttttccgttcgtaattggtgacttaaataattcaaggccagttgataggccttggcattgtcgtcttctttttgaatgtcgcgttgtaagctactatcgatttcgagcccttttgcaagccgaaacttgattaagacactttcagtcaccccaaaggcaaactgctcgtcgataaaaatgttatagcgccctttttgtttttgtgaggtaattttagtaatctgtggcatcttattttctcccgttgcgtgtcgctttgacgttcagataaatcttaaagccaatcacgactaccgctaaaatcagggtgccaatgattaatggcaagctcttcgcttgaaaagcatagatcccaattgcaaggactatcaccatcgcaattaaaaattgatttcgttcccaaaagttcatcgttattcgctccttaataggggaattgctactaagcccctgactgctgttatattgcttatttaaatgcgtttaatcgataatatcctcaggacattaccgacttccatcacactctatttaaacgtgttctgcaagtcatatccctccggttagcgctgcctgtcaaataatcgctaacgcaattttttgcccggctgtgctaatcctcaggacataaccgacttccatcacactctatagagtagcataaatcacaacgcgcaacaaaatcgaacgctgttagtttccgattagaatatccgttttttctaaccgggttctgttataatagggtacagcaaatttcgtgctatttacaattttaacaatataggagttaattaaatgccagaacaaacaactactaatgaagtcgaagtcggccaacgtttcccactgaccatcaagcgaatcgggattaacggtgaagggattggttattacaaacgcaagattgttttcatccccggtgcacttcctgaagaagtcgtgattgccgaagtcacaactgttgccccccgcttcatcgaagctaaggtccacaagattcgtcaagaatcaccacaacgggtcacacctagagatgccacttacggtcaagttggtgggattgaattggaacatctcagttatcctggccaactcgcctttaaaaaggatatgatgatccaagccttagaaaaattcaaaccacacggttacaatggctatcaagtcactgaaaccgtgggcatggaaaatccatggcactaccggaataaagcacaattccaagtgcgtcaattaggtgaccacttaggggctgggttatacgccccaagcagtcatactttgattgaccttccagaattcgcaacccaaactgatttaacgatgcggattatccgcactgttttaaaattagtcgaagacctcggcattcccgtctttgatgaagaaaagaacgccggtatcttaaaaacaattgtcgtgcgtgaatctttctcaaccggtgaagcacaactaacatttatcaccaattcacccaaactaccaaagaaatatgcgctaattaccgccattcaagctgaattacccgaagtggtctcaattatgcaaaacgtcaacaaagggaaaaacgtcttggtatggggtgaccaaacaatgcaccttgccggtcaagaaacgattatggaaaacctcaacggcgttcagtttgaattaactgcccgcgcctttttccaactcaatcctgttcaaaccgctaagatgtataacttggttaaagaagcactcgatttaacccctgaagatcgcttagtcgatgcttactgtggtgtcggcactatcggattaagtcttgccaatcaagtcgctgaagtgcgtggtatggatacaattgccgactcaatcgaagccgctaaacataacgcagagatcaacgggatcgacaatgtggattatgccgttggtgcagctgaagacctcttaccagaatggttagataacggctttgtcccaacagcccttgttgttgatccaccacggactggtcttgacccaaaattaatcgatgcaattctcgacagccggccccttaaattcgtttacgtttcatgtaacccttcaacgctcgcgcgggatcttaagacattggttcatacctaccaagttgaaaaaatccaaccgttagacatgttcccacaaacggccagagtagaagcaatcgtcacaatgagattaaaaagaaatctataaaaaatgagtgctattcatagcggttatactctgaggactagcctaatcaggcgaataaccgatgcaatcggttgtttgactgatgtcgctagccacaagagtatgctatgaatagcacgttatgatttgagtgctttcaaaggtcgtttaccgccgagcactaatctaataacaaaaaacaaacaagccatcctttaaaatgaggatggcttgttttagttttctttcactttagctctcaaaaagaacgtcacaagcggattatcactgtctgtttctaactgatttgtttttaataatgccgtaattaataacgctaagccgatgacagccgaaataaaggcccaaccgcgagattgctgactatagctggatgcaagtccatttaaaacccataaggtaacggcgccccgaccgtttaaaccagcatcccgataacgacgaatactaagtgcaagtgtgggaataaatattcctacagcgataattgcaaagatgcccaaataaatccaaggattaataccagctacatgacctttagtgattaataactgtcctaataatataaatagtggtatataaagtattaatattattattcccattacccaccaataacctgcccgcgtacttcggcccataaagtcaaaataacctttaaagtaatcccgaaatgctgtcttaattgtcactttaccaggtacttcttgaatttcacgcatacttttccctccagttaactactatccattaattgtaccgcatatcgtctgcaatttgatacaatggtaaaaacacattggaggctcattatgaaaatttattttgcaaatgcactcttctcacaagctgattttgattacaatacgcgtgttgttgcaacgctacgccaagcaataccaactttagatatctatttgccccaagaaaacgcagcgatcaatgataaagaagcctacgctaattccgaaatgattgcccaagctgataccgaacaactggttgccagtgacctagtgattgcggtcttagacggtccaacaattgatgttggtgttgccagcgaaattggtgtcgcatatgcccgcaacatcccaattatcgggctttacacagacagtcggcaacaaggcaccacgaattcacaaaaagtggctgctttgcaaaccattgctgaaaaccaattccattacctcaatctttatacggtgggcttaattaaattaaatggcacgatcgtcaactcagtcgatgctttaatcgaaaccgttcaaaaatactaagaaatagcggccgttaatgccgctatttttttgtttctatttttaaataaaggcgtatgctagtaatcaaaaggagctgatttaatatgtatgatcaatcgataaaagaatatcgctgtaatatttgtcaacaaacaatcactgtcaacgaacactgttggaccaatattcaattaccccctggtcgtttcatgaacggttatatggatattcgcgaaaccttaaaaattacgaacgcccaaataatttgccaaagttgtgcccaacttatcaacaagtcaatcgatttggaccagattcgaacacaagcctcagatactaaatcatgacaatcaaaaaaggattcaaagttgatagctttgaatcccctttatgtcgaggtagatagcttggttgctgcttgctgattctgttgtttactctggataatgttacacctcaatactatattcaattgtaattaatcgtttgttctaacctactgcttatcgtattactcgatctagtttagtcgtttcttggtgattgactctgcgtgcagcttcagcgataacgattaactttgcgtttgttactgctacgatattctttaacagacatcagcctccgatatactcgcacttatacgctttgattttgcaattaagttgtcattggacccacttcctagcaatcactcagtgtacttttaccaatcttatcttgcgatgtgttgttgtgattttggttctaaaactttaacaatttgtaccttttgttacttagtacctgacaaatacggtggcgcttaacaaatgtgattcacttggttttgttctgccaagctatctttcctcaccattaatataccaccttatgtaaccggttacaactaaaacacctcaattttttgaattaattttaaaaagttttaaaacgttgatataccagtattttaacccaaaataaaaaggcgattttgataaaattaacttatcggaatcgtctttttgaaacgtgccttatcaacctgattcttgcgtttagctacgtcagttaaataatcgatcaacccgattatttccctaactaggctaatcctcagaatcatcccggttgctaagccactctatcttgtcatatatattctttcgtggtccttcacgccttttaggataattggcgcgttgtccattgtcaggtcaatttcatattcgctaccgtcttctggtagttccgtttggaattgggtttcgtattcaaccatcgtcagttgacgacgcttagctaataagtcggtatgtttttgctttgctaattgtttttcgaaaccgggttgtaaaatccctgtgaaaaattcgctaacggcccctgacccgtaactgaaaaagccgattcgatcgcccgcttccagattagttgaatgttctaataatgaaaggaagcccaaatatagtgcaccggtatagatattcccaatttgacgactgtacaaggtactttcagcataacgttctaagagttgtgcttgttgttcttcagtaccttcatctagaattgtccgcaaggcttttagccccatcttagtgtacggtaagtggaaagctaaagccttgaaatcagcaatggtccgccccgttttagcacggtaatccgcccatgttttttggaagaagtcgatgtattgttctgtcgaatatttgcctcgtgcaaaggcttctttagaatagtttggccgccagaaatcttgaatatctgcactgtggacactcgtttctggttccagaaccatcaagcgtggttgggcactgaccaacatggcaacggcgccagcaccttgtgtcacttcacccggtgtttctaaaccgtagcgcgcaatatcagaaccaatcaccaatgccttttgatccggatgagccgcaacataatcataagctgtcattaaaccagctgttgccccgtaacaagcttcctttatttcaaaagttcgcgcattgctgaggcctaataagcgttgaatacagatggccccagctttagattgatcaatgcctgattcagtccctagaattaacaatgaaatattgtcgcgtgattcaccttctaataaatccaaagcggcgttagcgcccattgtgacactatcttggcttaatggtgcaatcgccatttgatcttggccaatcccaattgtaaatttatcagggtcaacaccacgcgcatttgctaacatgacaagatctaaataagtatttggggtaaaaaggcccaatttatcaattccaatttgcataataaacttccaatctatctgttttcagcacggatttgacttaataaagtcgtcgctgtttcagtatttaagtgcggtgcttttaataattgtggtaataaagtcgttaattcgctggccgttgcgccaactgcaattgcgagtgatttagcttggagtgccatatgacctttttgaatcccgtctgaaacgagggctttcaaggccgctaaattctgacctaacccgatggctgcaatcacgccagctaattcttcaaccgtttcgatggccattaagcgttgggcaacttgaactgtcggtaaaatcccgattgaaccaccgacaatgccgactggtaatgggacggcaatttgaccgcacagttgatgatcagtggtccacgaccaagccgttaagggttgataatggccggtacgcgcagcataactgtgtgcaccagcttcaatcgcccgccagtcattaccggttgccataatcacagcatcaattccgttcataatccccttattgtgcgtcgtagctcgagccacgtcaaactgagcaaactgagtcgcgtcaatcagccgttgcgccactgcttcacccgttaaggtcgccgtcgctaaagtcgccggattaagcgtcactgatactttaacaaccgacccaaaggcagcgttcgtcaaaacgctcagcaaaatagtcccacctaaagtcgcttgaacagcatgggcaatcgcctcacaaatggtatttacaatattagcgcccatcgcagccttagtatcaatttcaagattcaatttcagaaaacgattttcaacgatcgtcgttgcaattttctgcaaaccaccaccacgtttaacaattgacggatgcgctttttgggcgaccgcttgcaaaacagtaaagtggttatccacccattttacagcatctgctagctgaggtaaatcagttaaaacaacttcaccaaacatcacccgtcggctactttcaattgtaacgccgccatttaggcgcatcatcttcgcggcattattagccgcggcaatcactgatggctcttctatggccattggtacctgataaaccttaccatctaccataacatcttgcacaatacctaatggcaagtgatattgtccaatataattttcaatcatactatcggctaattcatctgctaacggttggctttgtgccaaaaattgtgcatccttttttgaaagttggctggcctcaaccaagcgggctaaccgttctgattttgaaagttgataaaactttggactagtcatttagccacgcctcgtttagttggatttcataagcaatccctaagccgccaccaatacataacgaggcgaccccagttgtttggttggtccgttttaattggtgcaataacgtggtcataattcgtgtgcctgaagcaccgattggatgtcctaaagcaaccgcaccaccagcaacgttcactttagcagtgtctaatgctaagccgttttgaactgccacgctggaggccgcaaaagcttcattgatttcaaataaatcaatatcagcgagggtttgagcttgcttagccaataattgttgaatagcaggtactggcgtgtaacccatgtaattaggatccatgccgacttcttgataaccaactaatgttgcttgataaacaaggccgagtgcttcggctttttctttagacatcacaatcattgccgatgcaccatcgttaatccctgaagcattagccgctgtaacggtgccgtctgcttggaaagcaggtcgtaatttccccattgcttcaagtgttgtatcaagacgaatgccttcatcttgactcacttcaaaagttgcccgccgttgtttcacagttacagggacgatttcagcatcaaaccacccagcttgtgtcgcttgagctgccttttgatgtgattctaaggcgaatgtatcttgcatcaaacgtgtaatgccgtatttggcagccacattttcagccgtaatccccattggtttattggtgaaggcatcatttaaaccttcactactgatactatcgacaacggtttgatcaccaaacttgctgccaaaacgcattccgttattcaaataaggggcttgtgacatgctttcagtcccaccaactaaaacaacatcggcatcacccatcacaatcgcactttgtgcaagacggatggccttcaaaccagaaccacaaacttcattcacagtcattgcaacgctcgtttgtgctaaaccgctgtttaacgcgatctgacgcgccacgttttgccctgaaccagcttgtaagacattaccaaaaatagcttgatcaatttggtcagcttcaataccagctgcttgaatggctgctttagccgcgatagtccccaaatcgactgcggttaaactagctaattgcccgccaaacttcccaattggtgttcgtttggcactcataatgactacttctttcataatatccctcttcacttataagtctaattattactataactaaaaatttggcaattgtatgccaaatttacttttctttaactaatttttaggattattctaaaaatgtttaccattttaaggtggatttggtttactcattaacgtaagcgattcaccggtggccttacaataaaaacttggaggttttcaatatgcaaacaacatggttaacatcaacaattgcgttcgaattacaaaacgaggcctatgaagacgatcatctcatgcggcgtttaagcgcagtcaaagaaaacgtacaagccgacgaaattcaagcagttggcgaagcccttgccagtctgcatgacgacgatcaatttatcatggccgaactgacaaccaaatcagtttataacgctaagtaaaaaacataccaattctttaggaggaattcaagatgaaagaacttaatttagaatttaaaaccagtgttaataagaacaaaacattacgcctacgccaagtcaacgaatccctaacccctgaagtggttaaagcagcaatgattaaaatcgccgacgctaatctcttcgaaaaagacgacatccaactctacaaaacaccagtcgcagccaagtacgttgaacgaattgaaacaccaattttttcagataaataagcgtctgcatcagtcaggtatatcctgaggattaacaaaagttcgaatccaaaaaacgcccgggacaaattcaaatttgttccgggcgtttttttgcctttatgggttctttaaattttagcttgttcgcttgtcaccatccttgacttaggtgtacgatgacccttattaagttattaaggtaggtttagtatgtcactttcaaatccactaaccatcgattggcaacaactactgcttgccattatgcgcaactgtgccctgttaattttgatgccactaggctttgccgccttgttaaccgtgattaatcgctcaacgaaaacacgcttagcacgctggtggccccgctcacagattgtgattggtggcctcggcaccattattcacgaattgagccacgcattattttgcttcatcttcaatcatcaaattactgacatgcaactgctcaatcgcaacttgaacgattctaatgaccactcgcttggacacgtcgaacaccgctatcgttctgggcagctgtggcccaccattggtaacttctgaattggcttagcacctatttttggttgctccgcggcaattttaggcctcacttggttactagcccgcaatacttttcaaacctggctgacatttgccgaagaaccaatttggcaatggcaggcagtcaaaccattattcagccagctactgacgactaccaaacccagtttactactcatttggctgattctctgtggcatgattgctattggtggtttcgacttatcgaaaaccgattatcgagggatgattcccggaattattgccgccttgatcgtcattatcgggggcactttcatcgctagtttattcaatcaaactaccagtgggaccagttggctactaactattctgacaccattaatggtcattttaacaatcgtcgtcttactctcattgattagttggctgattgtcgctacactacttaaaatgccacaaaggagtcgatatcatgcgcgtcattgatttattacagttactcgccgatacgccacgtaatgcactcatttttttcgaaggctcagatcaaaattggccgattgccggttttgaacaagatgtccacaatgaacaaccgcgtctgttattacagatggtcgccaagaagccacatcccctcaagcaatgggaattcagcctcctcttaaatcaccgtgaatactatcaacactacgtttacgttaatcaggatgaccaagcttacccactatttggtttccgcgtggcccaaaataaaattctgctcggctaatgttgcaagtcagccgccaaagcggttaaatactggtgactcgcaaccatttcccgcgcatcattttgatcagccaactgaacttcatagatattggttgctgctggatttaaaaccggcacaacccggcgccaatcaatgcggccagttccgagttctaagccatcatgtttaagtcctaatgaatcaacaagatgataatgggcaatcgctggttttagcgtctgtaagctctgaactaacacgtcattatcgccatggtacttaatgaaacaatggctcgtatcaaaagctaatcgatagccttttgctaaaatagcttgatctaaatcaggattaccgtaataaaaaagcggtgaaatcgaattttcgaagaatagatgatcatgaccaatcttgttgagatagtccatccgcttaaaaagtacctcagccgcttcagtgagattgcgataaccaactgtcaattgctcaacgggttcatcatatgaaccgtggactaataattgaacatcttctgcttgagcgagttgcaataagtccaacgttgactgccacaaaaagcgatagcgcgctggtgaactggcctcactcatcgataactcaagatgaccgccttcaaaattcatcggatggtgtaagataatgtgctgcaccccttggttacggataaattgaatcttatcgcgcagcctttttaaaccagcacttgcgacatcttcttccgtcagatgaaattcaaatacgctgggatgatattgtaaacgatccttaatttgacggtcattcacacccgcctttaaccctagttgcatagcccgacctactttcataattcaacgttagtttcattttaacacttagcaaaaatgctaatcaattatcggctcagcaccaacctcaattcgttttcaatgtttattcatgagatttttgctatgcttaggttagttaataaaggaggtctttttatggatcgttatgccgttatttataatccgcattctggccaagatcatggcgagtcagttggtaaaaaaattgaacaagccctcgttaaaaaccagcagacggttgaattgatgcctactaaaggccctaaagatgcgacacgcttagcaaaaaaagcggcgcaagcgcagttcgatatcgtagtcgctgtcggtggtgatggcaccatcaacgaagtcgttagtggcctagctactttagagcagccaccttatttaggaattgttcccgctggtaccgttaataatttggcccgcgttttacaaattccgttagatattgaccaagcgattgaaaatctacagcaaggccatctccaaccactagatgtcggtcaaatcaatgatgactatctaatcagtacgatgacgcttggtattttagctgacgctgctttgaatgttacccagagcgagaaacaaaaatggggccccttggcttttttaaacgaaggtattcgtgtattagccaagcatcaacattaccctttaacaattgaaacccctcatcgtcactggcaaaaagacacacagttcttgctcgtgacactcaccaattccgtcggtggttttacaaaattcaatcccgaagcgcaaccagatgatggctatttccatgtatttgtcgctcctaaaatgtcattaatgcgctctgctatgtttctcccctattttctaacaggcaactttaagaaaattcctggaatgacctactttaaagctgataaaataacaattaccactgacaatcaagaaagtgtgcaaacacgcattgatggcgatcctagtaccaaatcaccgttaaatatgcggttattgcaacacaaattacaagtcatcacgcctcactaggctattaaaaaagacaaagtcttacgactttgtcttttttctatttcgtttcattttcttgataacgttgataaagtgattctaagaattgaatttcagttacattttgataagggagcacatagaaattagcgagaccgtatgtcacaccaaccaataattgccagaaataaaatgaatattgcatgattaagaattctaatttatagccatgcatgattttacgactcatgttaatcgcttcgctagcagtcatttcaggatttttttccaataagacattagtcattgcgtatgaggcccctttgacaacccccggaatgacgaataacaatgaccagcagaattgatagaaggtggttaaaacatttgcttttaacacccggttcttttgcgcttttactaagtagttaaaaattttcaacccatcggcacgctgacctcgtaaagtaacgattgcgcaccactgtaaaacgggtttgcgtaaacaagcaattaagaatagcactattaagagcataatcaccactacaaaccataagaaaaccgtaaatccggtcggacctcggtcagagtagaggttccccaaaattgtcatttcaatggccgtcatcattctgccaaaactcattaccaaaagaaatgtgacaacaatcatccccaccaccaaccacaagatggtcttcatccattcgccataacgtccggataatttacgttgagcttcctttttgatgtccgcccgcgtcatatttaacccctcgacttggtctaattggagtgccatttcttcatccgttttcaatttttcaaaacggctcttcacactgtcacttgttgcgtttggattggtcatttgttcgatgttaaacccacatttgggacaaaacttagccccctccttgatctccgaaccacaatttggacaaaacttcatgattatcttcccccactacttaatattaattctcttttatactactattattaacttcttttgaacagggggttaattaaaatcacgtattattcgatcattatttattacgcgcgtatctcgcttctaccttagctttatctgcttgccaccattcctcatggtgccgataccaatcgattgtctgctgtaacccaactttaaaatcggttaattgcggttgccatccaagttcttcacgaagcttggtcgcgtcaatggcgtaccgcaaatcacgccctggtcgatcctgaacttgatcatatgcatccttgggttgccccatcaatgttaaaatcatttccaaaacagcttgattcgtgcgttgcccatcagcaccaatcaaataggtctcgccaattcggccacgtgtcaatattgtccaaacagcgctagagtggtcatccgtatgaatccaatcacgaatattttggccagtgccatataacttagggcgcctaccacttaaaatattggtaatctgacgcgggataaacttttcaatatgttgatacggcccataattattggaacaattggatatcgttgcgcgtagcccaaatgagcgcacccacgcccgtactaacaaatcagaactcgccttggaagcggagtacgggctactaggattataacgtgtttcgggtgtaaattttgcatcacctactaacggtaaatcgccgtaaacttcatctgtagaaacgtgatgataccgcacatgatattgtcgacaggcttcaattagcgtataggaacccataatattagtttgaataaaaggtgttggatcctgcagcgaattatcattatgactttcagctgcataatgtaccaccgcatccaccttttggactaactgctgaaccaatggtgcatcacaaatatcaccgactaccaacgtcactcgttctgctggtaagccggctaaattagcccgattaccagcgtacgttaacttatccaaaaccgttacatggacttctggctgttgccggaccacatagcgaacaaaattagaaccgataaaaccggcaccaccggttacaagaatatgacgtatcatttatcaaatctcccaactacttgttatcacttatcatagcacggacaacaaaaaaaaagttacccagtaatttaaaccaggtaactctttaaacagctttttctaaacattcaataccttattcaagaagtccttcgttctgtcgttttgtgggttgccgaagacatcgtctggggtgccttgttcgacaatgtgcccgtctgccatgaagatgacacgatcagccacttctttggcgaagcccatttcatgggtaacaacgaccatcgtcatcccttctttggccaagcgcttcattacttcaaggacgtcgccaaccatttctggatcaagcgctgacgttggttcgtcgaataacagaatatcgggtttcatcgccaaggcgcgcgcaatggcgacccgctgtttttgaccacctgaaagtgagcttggttttgcatcgtacttatcagataagccgactgtttccaaaagatgtttagccgtttctttagcttcttctggtgtcattttgcccagttcaacaggtgctagtgtgatattttcagcaacggtgagatttttaaagaggttaaagtgttggaacaccatcccaattttttcccgaatctggttcaaatcgctcttacgatcactaagattataaccatcgacgatgatttcgccactcgttggttcttccaaacggttcaaacagcggagaaaagtactcttcccagaaccagaaggcccaatcataacaaccacttcattgttgccaacggttaaatccaaatccttcaaaacttcattactaccataatttttaatgaggtgggacacttcaattctattcattagttattcattctcctctcgatatacttcgataaccatgtcaataatgtaatcacaatcaagtaaatcaacgcgatcatcccccagattttgaagccttctaggtttctagcaatgataatcttgccggcttgcgttaattcaacaataccgatgattgataagatcgaggtatccttcaatgtgatgatgaattggttaataaaagatggcaccataatccgaatgccttgtggtaagatgacgcgacgcattgctttgccatatggtaagcctaaactacgggctgcttccatttgaccagcgctaacggcaccaatcccacctttaacgaaggcggctgtataggccccttcattgaacatcagtgtaatcacaccagcgaccattgcgggaatcttttgccccgtcaaacttggaatccccgtgtagatgaataaggctaagactaatagtggcaagccccggaagatataaatcactgtatccgaaacggcccgtgcaaatttattcggtaacacgccgagtaagccgaagaagacaccgaagatggttgcgaagaagatcgcgatgaccgttaatagtaatgtttgacctaagccatctaagattgcgcccttattttcttttaataaaccgaagaaactgtgatcagcttctttttcgctagatgctttagtgtttaaatattttgcttgaattttagcatattcgccactggcttttaacttcttcaagcccttgttgaatttagcgactaattctgggttcgtgcctttcttaacagcgaatccgtagtcgccgccttgaactggctttgtgacaattttcaagcccaaaccagtcttaattccgtattgcatgactggttcatcttcgaaacaggctactgagttaccgttgacaacatcattgtacatattgtcggaatcatcaaaagtaaccgttgtaaagccgtactctttggcctttgattttgcataatcaccagcagccgtcccagtcttaattgcgacccgttggcttttcaatccttttaagccagtaatcttactgtcttttttaaccgccatgacaacgcctgtgtgataataaggatccgcaaaatcaaattttgctttccgttcatccgtaattgtcatcccggcaatcacaccatcaatctgtcctgattggaccgcttgaacggcggcattaaagccgagaggttggatattcactttgaaaccttctgattttgcgatggccttcatgatatcaatatcaatcccgacatacttattatccttattcgcaaattcgaacggtggataagtgacatcagttccgatttcataagtcttctcagccgcttgcactgattgcacctgttgactgccaaatacaaacagtcccagtaacaacaaactactcaaaaataacgttattttcttcattgtgaatcctcctctataccctcttaccggtcattaaaattaaaaattaataagtttatttataatgctataatcataattataatcaaaaacacatactttgtcgaatttttattcattttgtgcctaaaagataaactttttatttattctaaatgctaaaaaaggcaattaacctacccggttaaccacctttatttcgagcattagccgagtttaacgacatccgccaatgcttcattaatttgatgacaataatctttttgaatttgtcggatctcctgtaatttttctaatattaacgaatcgttctctgtttcaatgattgataacattttttcaacactttcagcgtatcctctaaaagcttcctttaaccgttgattagtttcagtaaaataacttggcggattaatactttcagtcaattccacaaaatgtcgcaaattcaccaaattcttctggaaatacttcttcaaggaatgcagattctcattaaccaaacatctgcctaatacgatattacggcaggtttgtgtgtattcgttaaaaaccgtatcaaatactaataatttctcaacgacctggttgcagcgcatgatataagtaaccgacgataacgtttctgtttgacttaacattttattatttctcccctctattgttatagagcttaaagtcttccaaattctaatagttaccattgtatataatacgataaaccgtttattagcaatgttaatcgctttctttttttctaattttttacaatatagaccattaaggccatttatatgaccgctcggtgtaatagcttactaataccacaaacaataaaccactaaatctatcttgcactagaccactttaatattgattagcctattataaaattcagttcatataaattaaattttataaataaaattatattgtcaaccgttattttgtcccaatttgggcagttcgtgaatcactttgagcaacatgattctgttataataggcttattaacttgtgaggagtttttttatgattaagccgattatgcatgataccgaatttttgagccaggtggccctacctgccacaactgcagatacagcagttatcaccgatttaattgatacattacaagctaacaccgatcgttgtgtcggcatggctgctaatatgattggcgttaataaacggattattatcgtccaaatggggattctccctgtaattatggtcaatcccaagattatccgtcacagcaacccttatcaaactgaagaagggtgcctatcacttgttggccaacgttcaacaaaacggtatgaaacaattgaagtaagctatcaagatcgccaatttaaagcacagcaacaagctttttctggctgggtagctcaaataatccaacatgaaatagatcattgtgagggcatcctcatttaattcctattacacagccactagtccgatttggtctagtggcttttttatatcactaaaaatttttttaattaatttaaattaattaaaaaattaaattcggatattatactatttgccgtctaaaaaatcagcttagttctagcatttaatttaatttattttcgaaacaaaaattaccgttgcgacatttatattaaccgttcaagtaattagcgcttttaacaatcgtcttttaacgccatattaatgacttaaaagggcataataatagccatttttggtaaaaacgtgacaggttaaagatgctattttattaagaatagtgatagaatattaaataatcaagtaatataaggagcacttttaatgttaaatattgcattttgtgacgataatcagtgttttctaaaaaaaatcactcaagaaatcgatcgatcattagccatcaaagcaacttatcagacttttacaaatgcaaccgacctactcgatgcctttaaacccggtgtattcgacgccctttttatcgacatttatatgcccaaaattaatggtaaaatgttagcccacaaaattcgcaatcttgataagcgggtaaaaattatttttgtcacccgttatgaacaagaaattctaaataccctgcaatatgatatctatgattttctacctaaagatcatctcagtgagcgcattgataatttgctggcacggctgagtcgctctgtggcttttgaaaatagcaaatatcttagactgaaactacgcgaaacaactggtgaagaactctataaaaaagtctatcttgatgacattatttacgttcaatcactcaatcggaaggtttatctccatctggccgatcaaacccaatttgaacttatcggttataccttccaagaaataacagattcgctagttgaaaagggatttctgagaacacatcggaaattctccgttaatccaatttttattaatgaaattaaaaacaccagcatcctaatggataatggtgaagaactagatttaagccgtcgacgaaaaaaagaagttcaagaagcatttatatgcggtatacgggggattctcagtgactaatctaattatctacgttacaccgactgtgattgaagtgaccatcctttatgtactattgattttatttttaaatacgcgttttattcaacgaagccgggcgattgctgcgctaatcacactcattgcgatagattcataccttactatttttatctctgaatcaataccatatatccgtgcactgctaatccccatcgctgtcagcctttcatcaatattactatttaaagataaaataattaaaatcttttactttgttgcattaggttactattttgtttatttctctgatattttttctgggttaatactctccaaccttctcaataaaaatatcctacaagttatcgacgttacagatttttatggcatcctattctatattctgacgaagtcgatcatgttgcttctaatttatggctactaccactttttcaataaactgaatttaaatatctcatatcactatttgatgattatgaattgtattttaatcattggtgccatcctaattgacaatttcatgtccatcatcagtggcaacttacaacttaacaatacgggcccgttatcccataaaatactaattatggttattttactcaatatcactatctgcttaacgatttacctattttcacaactaagcctctactatcaaaatcgtgaatttgaacttaaccttcaagcgacttctactgtcttaaaaaacgaaattaaaattcaaaataaaaaagaacttgaactcagtcatatgcggcatgactttaaagaaaacatcatgtcaatcaaatacatgattgaaaatgagcttgatactgaagccattaattatgtcaaccagattacagggcaattggagaaagttaaagcccaggttttaaccggaaatgtctatattgatgccgtcttaaacaacaatatccaactatgtgcttctaaggatatcgaactctcacttaaagtggaccaagtccagactgaatcgttagaacccgtttccctctccaacatactaattaacttattaaaaaatgccgttgccgcaaccgaaaagctgccccctgaaaaaagaaaaattagcgttaagatttttgaatacaaacacaaattggtattaatcgttaataactctcatgccgaaacccatttaggtagtaaggtaaacctttctaacaaaagttggtttaagcatgaacatcacggactaggtatcgggattattaagaagagcatcgatcgactagacggtgattataaaatagcctacgatgaaacgcactttgacatgcttgttttattacctatcgatcaaaaataataatggcggtgttggtggcttggaaaaccttacaaaaatgattactaatctactcgttagaaaaaaagtgatttcagcagacgaacaagtcttctacaattatggcgttgagctaacaattaatgagtttttgattacggcctccatcttattatttgggctcagcactcatcaattttggctcactgtcggttatgtgattctctttagaatcattcatacacaaaccggcggctatcactgtcggacctatttaaattgttatctgacatccgtttctctggctattgttgccatctatctcgcgcaatggctattattcaataccactatcgcgattattttctcgcttctatcagcccttgctttctggtttggaacaccacttatagaagataaacgtgttaaaaatgaaaagtttaagcgtaatcggatcacgattatcgttttcggcttattctcagttttgtgtctgttcttccattttttagtcgttccaatcggtgccgcgacactggcaactttagtactagtcacaatatctcatttaaaggaggtgatatctcatgaaaaaagtcctaaattacgttagagaagccatcgtattaaagatgcgcttaaactcaaaaactgtttctgcaggctggagctacgaagttaaaaaaccagctgaattagacaaataccttaagagtgttgactaattcattacaaaaaaagatcccgtcaatgacgagatctttttttatgctcaattactaaccgcgatggtcagcacccttcacttaaacgtgcttctcgaactgccttttccggttaaccacaaaatgggaatcatggctaaacccgccataatccccattttcttgttaatcctcaaagccaacccgttcgagtcagaactctatttagtttctttcttttcgctttgctttaattcttcacccaatttgataatatatttctttaaatcatctttaacttcggggtgttttaaaccgtattcgatacttgtttctaagtaaccgaacttgttaccaacatcgtaacgacggcccttgaattcgtgggcgaagacgcgttgtgtcttgttcaattcgtcgatagcatctgttaattgaatttcgccaccaaggcctggtttttgattttctaggacatcaaaaatttccggcgttaataagtaacgaccgataatggctaaatcactaggtgccttatcaacatctggtttttcaacgaagttcttcacgttgtataagtcatctttaaccttgttttcagggttaatgacaccatacttgtcaacttcgttatgtggtactttcataacagccaattgtgaggcatgtgtttcttcatattcattaattaattgcttgctcaatggcacttcatcttccatcaagtcatcacctaacatgacaacgaaaggttcgtcagccacgaaagacttcgcaagacgaacagcatcccctaaaccattaggatgtgattggcgaatgaaatagaggttaacgcccatgtcagtggtttcattgaccatcttcaacatcttcgtcttattcttagcttttaagttttgttccagctcaggtgctgaatcgaagtgatcttcgattggccgtttgcccttaccagtaataattaaaatatcttcgatacctgaagcttttgcttcttcaacgataaattggatcgttggtttatcaacaattggcaacatttctttggccattgctttagtggctggtaagaaacgtgtccctaaaccggctgctggaataactgctttgcgtactttcatctaaagaatcccccattaatcatagtctaagcatagtatgccatactcaggccgatttgtgacccttagacgctcaaaaatgagaaaaatattaatatcttaacacttgtttgttaacataatcacattaaatttgtaagcgcttgttaatgtttgctatcctcaattgaatagtttattaggaggtttctatgttactactacatacgcgtaccgtcccgctccaacacacagtttgtccggattgcctacctttaatcaaaaccgtcgattatgatctgcgctttcgtgaatcaattagttgcccgtatatcaaccattatcgtattaaccccgataccatgttgctagcgactaataaacatcgcagtttagttatcagtcgtaacaacggcctgcaagcgacgcccctttcaacccgcaaattaatgcgccagtataaccgtcaacaactcattgatttctcacaaatgcgacacatctatcataacttcggccacctacggaaactacctcagatcaatggtgaatatcaatttctaccgctcagtggcactgcccaccaaaatgcgagttggttagccctgcactacgttaaatattatgagcaggctggcgatcatctacggattacatttttgaacgaaacgagttgcgaactcctctataaaggtagacagctagaagctgaaattcatcaatgtgccgcaatcgggcgcattttgcgtatgagtctcgggatttgtgcgactaacttcggttatacaattgaactccaatcctgttttaacagcagtatcatccacagctatgactactgttgttgccaattatgcagtatggtgcccgataatccgcaacaattgattcgactcttagatgacttagaagttcataaatcaaattatatctaccaagcggccatacaagaatacaaggaatatccgattcatgaatttagctggtatttacaaggtgtacccggttttatcaggaaattacgcgatttataaaacacccgaaatattggcttttcaccgattttcaaggttaaataacacttgtttcagaaattactacttacgaattcctataaaaccaacgtttcactctgattaatcatcaaaaacggtcgttattcttttgattgctaagtcgttatagtgaacttaccgggaaaattcactgcgagctcgcggcctaaaggatgatatataatgaccaaatctaaccaagccgcttttaatctcttactccaagacgacaactttatttacggtgccctcaaatcgctccatattaaccgttatcacgagaatttcgatgatctctaccaagaagccatcctgaccttcattgatgcctatcagcgctttccaggcgatcctgagacccaagagcacgaattcatcgtctacgcttaccaagcgattaaatgggccacgatgcgccatttcagacaagaaaatggccggaacaaacaaatcggtttcgttaaccgtctatctgaagacgatgccctaatggactacctcgaccaaatcagtgatccccactgcgacccagataatgccgtcatctataacgacctcttcgaaaaactctaccaggtctgcgacccgcgtgaacgtcgcttcctagtcctacgctactttgccaacgccagcctaaaagaaatcgccgcggacttaaacatcacgcggcgaacggctaataatgttaaatttagggtgcagaaaaagtttagtaggttgttaatctaatagaaaaggataaagtcagtcgactttatcctttttatatactatctatattaatcaatctttgccataaatgcttgtaatgcctcttgccatgttggcacttcaaagccggttgctttaatcttcgttaagtccataattgaatgtcttggacggaaagctttctgtggatattcgtctgacgtaacgggacttacttctacgcctttatccttcaagatttcactcgcgaattcataccaagtacatgaattgtcgtttgaaagttgatataaaccgtaaggcacatcatttttaactgaatataacatgaattcagccaacgtccgagtccaagttggccgaccgacttgatcactaacaactgttaaataatcgtgtgtcttcgccaggttcaacatggtataaacaaaatttttaccgtattcaccaaagacccatgatgtccggatgatgtaatacttgctcatcgtgttagcaacagcttcttcacctgctaattttgtccgaccatattcgttcttaggtgcagcaggtgtttcttctgtgtacatttgatcgttagtgccatcaaatacataatctgtactgatatacaccaaagttgcgccaactgcttctgcagcattagcaatattttgtgtcccaaccacatttaccttgtagttgattgtcttgccaggttcttcttcggctgcatcaacggctgtataagcagcacagtggtaaactaattccggtttgttagcttcaaaataagtattaactgcttctgcattcgtgatatctaattcagcggcatcagttcctacgtattcgatttgattttcatctaataaatgacgtaattcagttcctaattgaccattggcaccagtaattaaaattttcatcgttaactcttctccttaaaaaaagtaggcactcgcctactttcatttagttatatttattgaccatttttagcatagttggcttcaactgctgctttttctgcttgccaccagttttcattatcacgataccaatcgatggtatgttgtaagcctgatttgaaatcagtaaattctggttgccagcctaattcttcgcgtaacttgcttgagtcaatcgcataacgtaaatcatgaccaggacggtctttaacttgatcataagcatctttaggttggcccattaattctaagagtaattccaagacatctttgttattttgttcgccatcggcaccgattaaataagtttcaccaattttacctttagttaagatggcccaaacagcgcttgagtggtcattcgtatgaatccaatcacggacgttttgacctgaaccgtaaagtttgggacgaataccacttaatacattagtaatttgacgtggaataaatttttcgatgtgttgataagggccatagttattagaacaatttgaaatagtcgcttgtaagccaaatgagcggacccaagcacggactagtaagtctgaactggctttcgatgatgagtaagggctacttgggttataacgtgtttcaggtgtgaatttttcgccaacaccttcgccatgacctggtaagtcttcgcgcaatggtaaatcaccataaacttcatcggttgaaacgtggtggtaacgcacgttgtatttacgacaagcttcaatcaacgtatatgaaccgatgatgttcgtttgaatgaaaggtgatggatcttttaaagaattatcattatgactttctgcggcatagtgcacaaccgcatccgtcttttgaactaacttatcgactaattcagcgtcacaaatgtcgccaaccactaattctacacgatctgctggtaaaccagctaagttcgcacgatttcctgcataagttaacttatccaaaaccgttacgtgaacttctggatggttgttaacaacatagtgaacaaagttagaaccgataaaaccggcgccgccggtaacaataatatttttcataagttagagtctccttaaatttcaccgtaaacaaatgggttgtctttttcaaattctgtaaaggttggttggtttgcatctttttctgatgtaatcgcttggtcaaaatcaattggccaatcaatatttaattctggggtcttaaatgaaatcccaccatcagctgctgcatcgtagtaaccatcacatttatataagaagttaacgttatcggttaacgtcacaaaaccgtgggcgaagcccttgggtactaataattgacggtggttacttgctgaaagaatatacccttcccattgcttataagttggggaaccggcacgcacatctacaatgacgtctaaaacagcgccagtaacgacccggattagttttgtttgagcggctttcccccgttggaaatgtaagccacgtaagacaccggcttgtgttgataatgaatggttatcttgaataaaatcgatatcaatcccagcctctttaaaatcacggtctgaatatgtttctgtaaagaatcctcggtgatcaccaaaaacagctggttcaataattttaacgtcttgtagtttagttgttgttacttttaattttcccatgattgcttacccctaatcttcgtttactaatctcaacaaatattggccataatcatttttcttaagcggttgtgccaattcaatcacttttgctttatcgatatagttcattcggtaagcaatttcttctaaacaagcaacctttaagttttgccgcttttgaacggttgcaatgaaactgctggcttcatgtaatgaatcatgcgtcccagtatctaaccacgcaaagcctcggcccattaattcaacatctaattgacctttttcaagataagccttgttaatatctgtgatttcaagttcaccacgtggtgatggcttgatattctttgcaatattaacaacttgattgtcatagaagtacaaaccagtcaccgcgtagttacttgctggatgttctggtttttcaataattgatttcgcatgcatgttttcatcaaaatcaaccactccaaaacgttctggatcgttaacatgataaccaaagaccgtcgcaccaacttcttttttggctgttctttgtagcatttctgataggccaccaccatagtaaatattgtcccctaggattaaacaaactgaatcgtcaccaataaagtcagcaccaataataaaggcttcagccaaaccgtttggtttatcctgaacggcatactcaatgtttaagccaagatcatgaccatcaccaaataattcttcaaaccgtggtgtatcagttggtgttgaaataatcataatatcttgaatcccagctaacattaaagctgacattgggtaataaatcattggtttatcataaaccggaatcagttgctttgagactgcctttgtaattggatataaacgcgttcctgagccacctgctaaaataatacctttcattttaaaactacccctttagaattattctttatctttataaggtgaaaactgttgtttccaccttttgatttcatcaaatggaatatgcaaatctatcggtgttgggtgttcaacaacttcttttaacctatctatattcttcatacttaagaccggtagatttgtatctttcgcaatttcagtagctcggttatcaacttctatgattgttgcccgtcgattatgctgtagtgctctaatccccgcatggagccgtgttccaacataatcaacatcttccgataatacttcatcatatgcttctaagcttggattaataagctgtattctagacttatttggaatatttaaacgatcaattaattctttatctggtggtgcttgaatccataatgccacttgattatatgtctttaacaatgttgttaacatactttcataagcctttatatactgttcatcatttctgtaatcggtaatcgtagttacaaccttatttgccttacatagtggtagttgatttaattttttaatatcaagcctccacatggttacacatgcagtattaatagattgaaatccgtattcttctaattttttttgagtatacgaatcacgaactgaatgtaaatattttgatgataaggattttctataaagatgtttttgtgcagcaacaaatggttgatcaattaaccgattatattgccgataagattgccatcccaaagcaattccgataatttcatgtattttattcgcatcatgaaaaccaaaacgccattgtgcaacatctcttcttgtgaaacgaccacttaataaattagagccaccaacaaattttaacttagtacgatccccccaagaatgagcaaacttccccacagtatcatgagtgggtgtacgaatcaacaagtcttctggaaatagttcacaaagctccttattcacagaatccattattatataatcacctaaattttcactagtttgactagtatcaaagagtaaaattcgttcagtcatttaattaacccccttctttctcaaaaatatcgcaaagttttgttgtagactgttctatactcagccctagaattttattaataccgttatcaacaagtttcgtatgtaacgcctcatcaaaaaatacatttttaatagcagaaacaaagtcatttatattattaggattaatcagaagtccagtttcattatttataacatagtccctgaccccgccaatatcagaagcaacaactaccgcaccactcaccattgcttccatacctgttagactccaaccttctagaagacttggcagtaaatagacactagatcccccataaatttgatcacgtaatactagttgagttggatttttaaatacattaacccattcaggtaacttttccggcatatcccatacgccaaacagatttacttgtaaatctggtacctctttctttaacgcttcaagtacctgtaatccaaacgaagttcgcttggaaggttcagaatgatttaatagtgcaacactatgtttgcgctggtctacttctttattaggaataaaaaaatctgtttccaaaaaattgggaactattggcggtgttataccacacttgtctgtaacaagttcttgtaaccaagttgcaataacaatattatttaatcctagacgaaaactattatctgcatattcattaccattaacccaagtttcatagttctgaataaaataatatttctcaccctttattttatttgcctttgctataaaataacttgtttcaacccctgtggcaacaaccacatccgcatcttctaattgatttggtgtaacaacattaaatttcattgaaatactctgatttaattgataccagctaacttgattattatttttttttaaaactcccatagatgcacccaaaaattttaaacgtcgcatccaatccctatgattaaatcttggtgaatacataaatgaaatcgttacttcataaccacgatcaattagttgattagcatactgataaattactttatatcccccaactggaacatcttcattaccaggtaaaacaaaatttactttcataataaactccttctatatttatcttattacagaatcaggaatcaacccaattgtataactaatatatcgtccagattcaggataaattaaaaagttctgtaaccaaaaaatggaagccgctataactactacatatcctaaaattaatagtcgtttatgtgtcatatgatccactaactttgaatagataataaatacaaaaactgaagcatctctaagtaacctaacgtaatctgatgaaagtaatgttaagataaccgatagaacacctaaaaaagatggaactaatacattttttgattctgtatcattaaaaaattcttgcactgaagtcttcttaaaaaataacggaattagcataaccaatacaatgattgctgtaattatccaactttttgagctaataccgttatcatataccgacactaaatcaccagaaaaacttgatctagcaccggttatacttagaaatatcgcaaatatattttgaattgctttagtccctaagaataaggacattatagaaataggtattgttgcataaactataatttttaagccctttaataaaaacttccatggaattaaaaataatagcccacctaggagaaaaaaataccctaatgtatggaatgttgttgctactactaacacaagtaatcccaatatattatttgtagtttttccctgtcttagtaatgaaaatcctaatacagcaagtgctaacattaacatatttcttacttgaattacttcgatagcaaacaatccaatattgtagcctaatacaactaggctgggattatttgtcaatctaaaaattgctatacacaatataataaatgtaatataaactaaatattctcgaaatgttgcatacgagaatcctcggttaaaaaagaattttgctaagtaagtatagcccctttcaaaattcgtcatttgctgattataacttaatttatataacctataatcagcattatgaagagtggggggattcgccattaaataggcatctactgctaaagcaacgaccgaaaatactttttgaagcttattaactaaaaaggaaatcgctaaaattatagttacaattataaaaatcattatttattacctatccatggttgagtagtaaattctgtagtatgaatgaaagtcatgagaataaaatggagccatcgtcttctatggtgcattagaggataaatcttactagtagaatgcatcctcgaaataaaattacttgcattataataatctttgtaaagtgagataattggcattacttcgctattaattagagtatcatcagatatagcatttccgatacaaacattgtcatgaatcaattgtccaggaacagctattgctttattaatcttttgcactattgtctcccgttttttaaccgccccaataacattaccaccatgttgtcgataataaacagttggtttgtttagctggtacaaacgaccagtcgcagcaattaataaagctagtaaagagtcatgcatattaacagactcaatcatttccttgctcacaagctttataaattgtaatcttgcggtattattaatggcaaatgcacaaccagttatcctataatcaaaagttaaaaatttaaaatcgactaagtcgtctttccaatgagcaatttgactcatttttttaccagtagaatttgcatctttatcagcaatccataaatcagagtaaacaccaattggtttatctgacggtaattcagaaaaagccttaagaaaatcattaagtttatattcgtcccaaatatcatcttgatcgcttaaaaaataataatccgctactatcagtggagatgttaataatgaaaagaaggatttttttaccccaacattacctttaggttcatttatcactgtaattaaattttggaattctttttgcaatgtttgtatcacggataaactcttatcgtcagagccgtcattacgaatatataattttatttggatattttcgcttacccgctgttcagaaatacttcgaatctgcgcctctaaaaatttatcgccattgtagactgacattaatatagcaacttgaatcttatttttagtcaatcaattcaccgcccttttctcttatcccatcagatatacctctacaaatgaatctaactctacttaatcttttactattaaaaaagatttcgaataccactcgttttattaatagattaattacataagttttacgtttaaaaacacgtctttgctttaataaaatgattgcattccggaaagaatagtaatttcgaaatggtgcagatatagtatgcttatgaacttgagcggaattaacctggtgtactagttgcgttccagcgacgattcctatacgatatcccgctttacgcattctccagcaaaactcatagtcaacaaagtcaataaataaatcttcatcaaattttcctaactgttcaaaaacttctcgtaaaataacagagcctgaactaattacttcgttaacttctatgattttattttcttctacttgtatagtttcctctgttgataaagccagcaacccatatgttggccctactgataaaagagttgtcactttttccagatcttctttcgaaacccaagaatcctgatcaaaaaaacaaattttatcaataaaatccgataggtgactaattcctatattctgagcatatccaattccttcattttttcttaatggaacgtaactgacatttttaaatactcctaactcctgtgtcagagtatgattaatgtcattggaattatctacaacaacaagctcatcaaaaaaagagacatagtgcttaagattatctatataatcctcaacaataggattatatacaacacataccgcaccatttttattttgcatctttaatctctcctatatttttgaaaaattcctgccaaccatcactctggctcttttcttcaaactttttctttgaaggaggcatctctaagcatttaaatagtgctaagcgtattgatgacacttcatctggattaaaataagttacagcatcatattcactagttacttcaacaactggactaatattcgaagctataatttgtctttgcaacatcatagcctcgataagtggtaagcccaacgtttcaattttagaaggaaaaactaaaaacgaatgactcaaaatatctattacctcagtacgaggaatacgtccagtaaattctatatatgaatcatcacttatatttccgtataatgtcctatattcctcctttgtaatcgtaagtattaatttatgacttgcctttacttcttctggtaatccattatacgcctcaactaaatttttatgatttttataaatcatagctgtacttggaaagaaaaaatcccttcctgattgtccaatttttttatgcttaaattcatcatttgatatagacggtcttgtaacaaatatttgttgttgactatatttatttaattcttctttcatccagtgggtttgtacggtaattgccccatgattaaacttccttaaattcaatttaatcatacttccaactaagtgttgataaaacgccattttccgctctgatgctttaaaaaaactaaacttataatttctttcgaaaggtaacggctggtgtacatacaacatttctggtgtatttaatccaagtattgcggtattttgcaatgagattacaacatcagcatttaaagagttaatgaattttgctcctgcaaaaaaatcaaaaaatatccttttgaaataatttttttgtagatcctctctaagaattagattaatatttgacactttcgttattacgtcttccgatccaacaataaacgtaaaagagtcttcaggatggttttcagcatatctattcacatcttgtaaaattgataatattccgcccgaattctttcgtactacaaagtcaacaattacgtagtgcatgcaaactcctccaaaatccttctatataaactatttataaatacataaaatctaatattttttcttatctgttcacaatatatcagttcggcattaaactgtactagcaaatcatcaaaatgttaactcgcacgcagaaaactatattctattattttctactttatttagtactttcaaagctctaaaattaataataaattctgctagtgctattattaataaaagactaaaactcttaagaccaggttgcatagaataattaacccccatcattaagatgattccactcattgaaattaacaattgattaatattcacttttaagaaaagatactgttgtatatttcgataccgaattatcacaacaagtaagaatcctaacaccgcaccaatccctgcaccctgtacaccaaatttaggaattaatatagaattaaacaaaatattggcgatcattccgtaaatagtagagctcataatatctctcgtacgcttaattgctaaatacattgtgccaatgaagctagaaaaatttgcaaataccgctgcaactaacaataatggtactaacttccatgcctcataaaaagatggagcaacaaaaactctcattaatggttttagaatcaataataaacctgatagtgaaatcatggataaagcaacattcgcgttcaaaactttagaaaagaatttactctttggattactttgatactcctcaacggccgaaatctgccacgcttgtgtaaagatattatagaatacattaataatagtaggaattttattggcaaccgcatatagaccattcgccgataatccaacaatcgcaacaataaagaaacgactagcgtcatttgtaaaaaaccacatgaacgcatttggtattaaaggaacactatattttaaaaaagttattaataactctcgattaaatttattaagaaataagaaattccaaactttagctcccacagaaattaaaagtatagatcctgctgcagaagcaatcattgctagaaaatagccgttaactccttgtccaagaacggcaattaaataataaccaacgctcgccataataacagttgaaaaaattccattaaatgcaaataatttagtatacccaattgcacgtataaagttttgaagtaatgcttgaatgataacaagaatgagatacataatcatataccctgcataacttacttgaaaaattctaagtattggataaattaagagtaatatcagggatacaaaaactgtaaacataataccagtcgtaaatgttgcctgtgcatcagattcatcatccatcatgaatctaaagactgcatcagcaatgcttaaagcaacgattggtgaaagcatattaacggtagttgtgataagatcaactgttccaaattctgcagtagatagatattttgtaaataacggaaccataaggaaagtaataattttacttcctaaatttccaattgcaaagattgcagaattactcagtaacttttttactttctgtgttgccattattaactgtatcccctctttttatcccttgtctaaactatacttggtaataatttttatttttagctgaagttaaattaataaagtctatattttcttatacattaagtgccagcataattttttaagtatgaatatcaattcataactctgtaagatggacttagttatgccatcttatagccaataaattttatcaagtttcttagtaacgaatatggtattaaatgtatttttttgatgctatacaaatacttaaattcatcaaatactttttttataccctctcgttcattgctgccaaattctttctgtatccaattatattccttattgaatctgccaataaatctatatcgtttaaattgatctcttaaattaaaatgatgtgagtgcgtaacaactgccgttgcacaatatcctactgaaaaattgtgttttatcgctaaagcagccatatacatatcttcagaatactttacatcaaccggaaaattacctaattccaataaatactctcttttatatatagaaaatgcgtctgaagagaatacggtttttatacccatactatccttatccgaataccttttaacaatacttttatcaggatagttaaaggccctatccctttgttcaaaaatatcacttttagtcatatcaacaatttgtttaccatatgcaacagccatgtcagggtattccagtatgtaattatagatattcttgattgcattatctttcatatatacgtcctgtgtcatatagattatataatcacagtccctcaaaatattggctatcttattacgaacaagtccatgagtaaattctgctttttcaatatcatacacggtaaaatcagcatctttagctattaatcgtgtactgtcgttcgattcagaatctacaattatttttctatccaataaatcactattaacatttatagcagccaacacatctttaaaattttcaccagcattataggtaggaatcgctaatccaattttcatttctattctctccaactcagtacgcatcatttggcataatcataattttgactgttctgaagagaatacccaaatcataaaccaaactgctttttttaatatattttaaatccaattcaaccatttcgtggaacccaatactattacgaccgctaacctgccacaaacctgtacatccaggtttaaccatgagccgttgccaatcatagtctgtatactctttaatttcacgttccaatggtggacgaggcccaacaagtgtcatatcgccaactaagacgttccataactgtggtaattcatcaatactatacttgcgaataaaacgccctactgatgtaattctagggtcttctttcattttaaacatcgcaccttcaacctcgttgtatttgagaaggtcttttaacttctgatcagcatcactacacatcgatctaaacttatacattttaaatttcttttgttttagccctaagcgagtctgtgagtagaacacgccaccagctgaatcgtcaatcttaatccaaatcgcaagtaccaaaaatagcgggcttaatagaattaaccccgccaaactagcaacaatatcgaatagccgcttcaaactacgataaatatatcgctgatctaataccgcctgattaaaaagcattacttgacgcgtattttcaatcgacgcccgactagtatcctgcttttgtatctccatgctttatttcccccaattaaactatttcttagattcctcggcaccataataaccaccataatagccaccataataaccaccagtattttctggcttcacgcgattcatgatcgtccccaagatccgtgcgtgaaccacatctaatagttccttagacttaattacagagcgcttatcggcaatgccttgtggtgccactaagattgtgccgtcaactttacttgctaaaatttgcgcatcagttactgaaatgacaggcggtgcatcaaaaatcacaagatcaaaatgtttcgttaattcaacaattaatttatccatcttctttgtatttagcaactctgatggattaggtggtacgaccccacaaggtaagacgaataaatgttcaactggtgttttttggatcgtcgtgttgaagtcaaattcatcttcggttaacaaagatgttaagccttttttattaggcacttgaaaggtttggtgaaccgttggtcggcgcatgtccgcatcaactaataatacattaaccccttgatcagcccaagtaactgcgacattagcactaatcgttgatttaccttgtgacggaccagatgatgttaaaaccagacttcttaatttttgatcaattgacgagaattggatattcgtccgaatggtccgaaattgttcagcaatcactgaagtcggtgaggttaaagtaattaacccaacgccttctttcatactatcttgatctagtttcttttcttttctaaataagcccatgaattcttaccctcttctcgataacgtacttgtccgcataattgcttttttgattaaatctttaggtgcgatgttgttaacaacacctaaacttgttagtcctaattcttccgttaaaaatttttcatccttaacggtcttatccattaattcgcgaacgaatgcaataccgataccaatcaataaccctaggattaaaccaattagaatattcagcttatttttaggagaaacaggtgttagattaggcttcgctttggaaataatcgaaacattatcggttccgctcataattttgggtgctttcttttggaaagtcgtcgctgtcatattagcgatatcagcagctgtgtaggcattatcagcttttgcagttactgagaagacttgtgaattttgattattcgctatactaatcattgaagcaatttgatcatccctcaatttttcaatttttccatcattaatttttttagcaactgaatccataataactggctttgtgattaaatctttgtacgtattaatcatctgaacgtctgtttgaacttggttatattgaacatttgcatcagtattctgcttacgattaactaataattctgtagacgcgctatattggggggtaatcacaaaaaatgttagaatacctgctaatacggtaaaaatgactgttgacgatataataaatcgactatattttcgtaaaattccaaaaatctgttcaatattaattgtttgttccataatatcctccaaaggttaattacgcagtgatgctagaccacatacgaaaagaagtcaatcattgctgattagctccctgctagtattacttcaaatctaattgatttctaagtagcgttgacatgtttgaaacttcgttatctgacatgacttggaaagattggccatcaatcatctgaccagttcccttcaactgttttgtcttgaagttcattgcacccccataattgtgttgaatgttcaagacatcctttagggtcatattggtctgcatgttattctctagaatctgtaagaacttattatattgggttactaagttcaatgaagtggccttcttcaagaccgcttgaataattgcttgttgccgcagttggcgaccaaaatcaccacgtggatcatcgtaacgcatccgtgagaatttcaacgctgtctcaccatctaatgtcactggacccttttcgaaatggtgaccttcataagtgaagtccaagtcattatcgaccgtgaccccaccgaccgcatcaactaattgctctaggcccttcatattcatcatgacatagtaatcaaccggcacatttaaaaatgattggaccgtatttatcgtcattggaatcccgcccagtgcgtaggctgagttgatttttcttttttgaccataaccagcaattgtgacccgtgaatcacgcgcaatacttagcatattggtctgtttcgtctgcggattgacggttgctagaatcatcgtatccgtccgccctttttctgtgcgacctaactcaccagtatccgttcctaataataaaattgaaaatggcgtttttttgttgagtttaaccgcttgattggctttacgtttattctgtgttttacctttagccttgtaaaccgtcttcgctgtttgatcgacatcatagtagaccttcgcagcaaaagcaccgcccgccaaaaccaagatacctaagaccaatagaatgattttccatggagtccatgttttcttatggtgtttatggtgatgataacgatgtagttctggttcatctgaattcatgtctaactttcctcctcaaggtgtacgatacgataataataattacattataggttaatcaatgttaaaaagaaatcacttttttgttaacgtcctgttacaacgctacttgcaggcctaattattaacagtgtttatgactcattttgctccttacggcgttcgatgaaatcgtggaccttcccctgactaacgtcgacttggccggatcccgcttcttcaatcgccacgttgacaacagcgccaaacattaaaaccattgccgaataattaagccacaataatagaattataaaagccccaattgtcccataactattccaagaagtcccaaaataccgcatgtataatgagaaggcttgcgctaatattaaccagccgaccgtcgttaagaaggcccctggtaatacgctgcgcaattgcatcttaacattggggacaaagaaataaacaaaaatcagaattacgaataagacaatgctagtaatcggccattttaattgtccgaaaacattaatgtaatcttccggtattttgaagattggtgttataaattctagaaattgttgtccgaatgtaaaaacgacgatcaaactgactaataatagtagtaagactaatgtggttcctagagaaatgaggcgttttagaataaaattctgaattttatcgactcgatacgcccgattaatactaattttcaaggcgttgatacccttactagctgcccacaaagttcctaaaatcccgacggatagcaaaccgctatttcgtttgttcaatagcgattgtagtatcggcataatccgattgaaaatcgtcgggggcacagccgattttacataatcagccacactgagcacatctaattgaaaatacggcaagatattcccgataacaattagcagcggaaagaatgataacagtgcataataggcaattatcttggcgttatcgctgatattagcctctgatgatcgccgaatcatcagtttaatgaaggcaatcaatttctgcttcccggaaatatcccgtttaaaaaccggtaattgattttgttcgtctgatttcatatttttcctcataaattcttagtatacgcgctcatgccgggtttcaacaagagcatcaaatgttaaaaaagtaaccatctgtgtatattatacatgattaagtgctagccttatagttttctgaaaacaaaaaaagaagccttctcatttttttaagaaggcttcttggtttggtgcttgttttagacgtacactgttctgaaacgtgcttttatattttataataaatatttcgcgtccatttctgcgtcttgtgatgttaagatttttggaccgtcttttgtgatggcaattgtgtgttcgtattgtgcacaggctgtgccgtctgctgagacgtagtattcccaatcgtcaccagggactgtcttagccttgatgtgccatgtgccacctaagatgaccattggttcgattgtaatggtcatcccttctttaagacgcaatcccttacctgcttcaccgtacgaagggacgttaggttgttcgtgcattgttggttggataccgtgaccgattaattcacgaacatcaccgtagttgttttcaacttcggtatattgttggatggcatggccgatatcacctaagcgattgccaacaactgcttgatcaatcccaaggtataaagccttgcgagtatcatccattaatttttgtaattctggtgcgatttcgccaaccgcataagtccagcaagaatcactttcataaccgtctaagttaacagtcatatcaacagtgacgatatcgccttcttttaaaattaggtttttacgaggaacagcatgtgctacttcgtcgttaacacagacacaagtggcatacttataaccttcaaaacctttttcagatgccttagcaccttgtttttcgatatagtcatttgcaaattcttcgataacccagcttgaaataccaggtttgataatatcgcgcaaaccacgatgaacaccggcaatgacagcacccgaagccgccatgcctttaatttctcgttcagattttaatgtgatcaaaatgaaacctccaataattgttaccaattcactattcgttgaaacggtaaatcgacagcgttaacccgctgtctatcttcaatttcatattatacgctatctgactcaaaagtgtacggccgaccgctttttaattaagattaaacgcaacgccttttcttagttctaggcatttgctataatccatatagcagaatctttattttggtccgtcagttgcgggccatcataccattgcacacgtgaaaggatgttcctaataatggcaacagcaaaagtagtttacgcaagtatgaccggtaataacgaggaaattgccgatatcgttgaagaagctctcgaaaacttagacgtctcggttgaaacgtcagaaatctcacaagcagatccttctgattttgaagacacagacatctgcatcgtctgcagctacacttatggcgacgacggtgacttaccagacgaagccgttgacttctatgaagatttaaaagaaatggatttaacaggtaaggtttacggcgtctgtggttcaggcgataccttctatgatgaattctgcaaagtagtcgacgatttcgctggcgtcttcgaacaaaccggtgccaccaaaggctcagacgtggttaaagttgatctcgcaccagaagcagaagacattgaacacttagaaaaattcgtagcagaaatagtagcaaaacagagtgctctctaagctggtcagagtggtttataaactgggagcttttgagcattagcttaatcaggcggattagcgatgcaatcgctgatttgactgatgttgctaagcgcagaaagctagtttataaagcacgtttcaagtcagagtgttttggctggcgtttagcttctgagtatagacccggttgccgaatgaatcatgtaatggttcgtttggcaatcgtagctaaacggaagaagttgccagacaaaatacgtttccaccaattcaatatttccccactgggtctagggcaattcccttttgctttgggcccagttttcttattttagttttacattctattattaatttaggggctctttttatggcttttattaagcggctattatttaaacaccgagatttattgacctacaccgtttttggttttctagcatccctggtcaacatcttcacttactgggtctttcgtcacacaatcatttggccttacttgttagcaaacacgattgcttggttactggcgaatttatttggctttttcaccaataagtccttagtgttccaatctaaatacacaactttcaaggcgctctttcgcgaagtgatttcctttttcttcttccgtggcgtttcctttttcttagataacggtctgatgattgttgccatctcatttctagggtggcagagtatgacagccaagattgtcgatcaattaatcgtcggtatcgtcaattacattacgacaagctacaccttcaagaaaagtgagcggcagatggccttacgcggtcgtattctgcgccattatcatactattttaaaacgaggcgatcatgattaaaacaattcaaaatctcattcataaatattgggaacaattaatgtatctagtcttcggggtattaacaaccgccgtcaatatggttgttttctaccttttagaccagtatactggtatgtattacttactcagtaataccgttgcttggtttttatcagttctatttgcctttttcactaataaaacctgggtttttcagtcaaaatacacgacttttagagatttttcacgtgaaatagctagtttctttttcttccgtggtatatcctatataatggatactgcgataatgtttgtcgggatttcaatgctccatggtcctaacatggtggttaagattatcgatcaatttgtgattatcctggcaaactacattttcagtaaatggattttcaataagtcaacggaggcttaacatgagcaaaacgatttcaattattgtcccctgttttaatgagcaagaatcagtcccactattttatgcagcagttgaaaaagttgcggctcaattaccagatcatgctatcgaatacttatttattaacgatggttccgctgatcaaacgctaccagcaatgcggacattacaagcacaagatccagaacacgtgcattacatctcattttcgagaaacttcggtaaagaagcggcgttatacgccggtttacaagctgcaactggtgattacgtcgccgtaatggatgtcgatctccaagatccccctgctttattacctgaaatgattcaaggtatcgaagttgagggttacgattgtgttggcactcgccggacaactcgtgctggcgaaccacccgttcgttcattcttcgctaaaaagttctatcaaattatcaatcatatttctcaaactaaaattgtggacggtgcgcgagattaccgtttaatgacccgtcaaatggtcgatgccattcttgaaatgactgaatacaatcgtttttcaaaaggtatcttcagttgggttggtttcgacactaaatatcttgaatatcaaaatcaagatcgcgtcgctggcacaacaagctggtctttctggggactcttcaagtactcacttgatgggattgtcactttctcagaaacaccgctagcaattgcctcatttatcggtttcttctcgtttattatcgcgtcaatcgcgctaatcttcatcattgtccgtgcgattatcttcggtgatccaacaagcggttggccatctctcatctcagttgctctaatgattggtggcttacaactcctttgtttagggattgtcggtaaatacatcggtaagatttatctagaagttaagaaccgcccagtctacattgttaaagaaaagaaataatcaaaagaggcgccacgacaaattctgtcgtagcgcctcttttagtttataacatgttttaaaattcttctggtcgttccttcgtttgttcgaaatgatacgcaattgcgtctaaaatccgctttgaagcaaagccgtcaccgtatgggtttttagcttgcgccatggcatcataaacttcttggttgtctaacaactcaaccattgcatcgtgtaccatttcaggttgtgtgcccactaacttcaaggtcccagcttcaacaccttctggacgttcagttgtgtctctaagcaccaagactggtttaccaagtgatggtgcttcttcttgcacaccacctgaatcagacatgatgaagaaacttctagcggctaagttatggaagtcaaccacatctagtggatcaatcaaatgaatccgtggatggttacctaatatgctttgcgctgcttcttgcacaactgggttaagatgaaccggatagacgatttcaacgtcatcatggctctcaaccacttgacgcatgactttgaagacccgtttcattggttcgccttgattttcacgacgatgcatcgtcactagaaccatgcgtttatcagcatccaccacgtttaaaatatcgtgatcatagtcgctttgcactgtttgtttaagcgcatcaatcgcagtattcccagtaatgaagatattatcttcgttatggttttcttgtaataagttggctttactttgacttgttggtgcaaaataaagatcacttaaaacatcggttaattgacgattcatttcttctgggaatggtgaatacttgtcccaagttctaaggcctgcttcaacgtgcccaatggccgtttgattatagaaggcactgatactagctgcaaacgtggtggtggtatcaccatgcactaagacaatatcaggtttttcagtggcaatcacgtgatcgagattcatcaagacgttacttgtaatctcactcaaggtttgacgctgtttcatgacatctaaatcataatctggtttaattttaaaaatttcaagcacttgatcaagcatctgacgatgttgagcagtgacaacagtgaccgcttcaaactctgtatcacgctttttaagttccaatacgagtggcgccatcttaatggcttctggtcgggtaccaaaaacggtcattactttaattttagacacaaatagacctcctactacttactattgctatcccttactatgctacacgtttggcgcacgattgacaattattattatcgtttcttaacgacttctttagacccgttccagttcaaaacaacgcattagcatcacaccgatttgcgttgaggctgattcttcatcaaattgcactaggtgcgcgttgattaacgtggcaaagcccgtcattgtaatccaaatttcattgactacttgttgttgctgttcttttgtcagacgttggagtggctgataatcatggagtcgaatatccgtcacttgattaacaaaagcgcgtgtttcagcagcaccaaaatgattatcaataaataacgcccggtagagttcgggttcaaccgtcgcaaaacgaatatagcccacacctaagttcacaagtgcgtcgtcatgatgctgttcttcactgacataccaaatcaaacgcgccttagcttgttctaagacagcctgtttcaattctgacatactcccgaattcaagataaatcggctgtgttgagcaattcaaagcggttgctaatttacgcgctgtgattgatttcaacccatccgtcaaaacaatttcgtatgctttatcgagaatttgttctgcttttattctttttttacgtgccatattaccagcacctcccaccacattattgactcaaaaacagattctttaatgccactctaccataaaattaaataacatgaaaacgtttttatagttggagcgagtttttttaatcatcctatgctatgatattggtatcaaataggctttaaggaggattttttatgacgactttccaacataatcttgaaaaatacgcagcattaatcgctaaaacggggatcaacgtccaagatggcgataccgttgtcatccaaattgcagttagccaagctgaatttgctcgcgacattacggcagcttgttacgatttaggggctgctgaagtgattatcaagtggcaagatgatgccattgatcgcatcaacatgcaacacaaggcgcaagaacgtttgattgacgtgccagacttccaaaaacaagaatacgattactggttagcaaacgacgctaagcggatttcggtgatgtctagtgaccccgacaatttgaagggcttagatggcgaccgggttgctgctgcccaacttgccaatggcaaagcaatgctgaaagttcgccaagcgacacaagccaataagaatagttggattgttgtagcagctgctagtcctgcttgggcccacaaagtcttccctgatttagcagtacaagaagcaactgataaattatggactgaaatcttcaaaacaacccgcgttgatcaaccagatcccatcttagcttgggaagcacatggtaaaaaattacacgctaaggctgctgaactgaacgctgctcaatttaaagcactccactataccgccccaggcactgacttaacaattggccttcctaagcatcatatctggatgggcggtccacacaatagtagtgatggccggccttttatcgctaatatgccaaccgaagaagtcttctcagcagctgatgccaaccatattgacggttatatttcatccactaaaccattaagctatgctggtaacactttgaataacatgcaattcaccttcgaaaacggccgcgtgattaaagccactgctgaagaaggcaacgatgttcttcaaaaactattacaaacggacgaaggggttaagagtttaggcgaagtcgccttagtaccagatccttcaccaatctcacaatcaaagatcaccttctacaatacgttattcgacgaaaatgcgtcaaatcatttggctctaggctcagcttacgccttttcaattaaaggtggcactgacatgacacaagaagaattaaaagcagctggcttaaatcgtagccaagcacacgttgatttcatggttggttcaagtgatatgaatatcgatggtttaacacatgatggtcaaatcgtaccagtcttcagaaacggtgactgggctaactaatgctaactttttggcttatgctgttaggtatttcgatttgcctaacaaccttttttgtcggtttaaccgcttattactattttcaaaaacaaaccactaagttattagtggtcatctcgttaattgggattatctgtacagtcgtcacttattactacttccatcaggccctattaacaccagctttataattaaacaaggattggtcccaaattcatatttggccccaatcctttttattttccttattaacacctgtacttaataaccattcgaatctaacctagcaattgatttgacacgattctttcgttgtgaaggatttcccaaaagtcattgataatctttctcaattagctataatgaagttaaatcagtcaatattaaggagacatcgctcatgaaagctatcacaaccaccaacgctaaacccttagaacatcactttcatttatcagaacggctcaatatcattcgggccggtgttctaggtgccaatgacggcattatttcggttgctgggattgtggtcggcgttgctagcgcgcaccaaagtcaatacaccctcttcttagctgggatttctggcatgttagcgggcgccttttcgatgggcggtggtgaatacgtctcggtcagcacacaacgtgatacgcaaaaatcaatgatgcgccttcaaaaagaagcgattcaaaacgaatacgatgccgaagtagcgagtctacaacggacctatgaatcaaagggcttaccaacgcccctcgctaaccaagttgcgacagccttcatgcaaaaggatagtctggatattacgctccgcgaaaaatataacattgaactacaccactattttaatccctggcacgcggctttttcatctttctcctcgttcatcttaggctcgctcttaccaatcctcacaattctagcgattccttatccttacaaagtcagtgggaccgtggcgtcaattgttgttgccttaatcattaccggctacacaagtgccacgctgggtcatgccaaccgcttcaagggtattttacgtaacgttttaaccggcgttttaacaatggtcgtcacttacttaattggcggttcgatcggttaggcttttctttggtaaccaaatttgctatgataggtttaatttaatcgttgccaccgggcagttaatcacttctataggtcttagaagaagtgattgactgcctttttttgtggcgcgacaacattaggaggctttatattatggcatggttcgatttattaatcgcaggattagcagaagtttggtgggcaactaccatgaagatgagtagcggttttaccaaactcaactacacattattaacgattgtcggaatggtggttagctttggctttttgattcgcgcaactaaaggcttaccgctcagtatcgcttacccagtttggactgggattggtgccgttggggcgattttagtcggtgtgattttattcaatgaacatcttagtttgttaacttggttattcgtgattttactcgtgattgggattatcgggattaaagtgacgagcggtcattaaacaaaaataagcttgcccactgtggggaagcttatttttgtgcttgtgctaactgccaacgtgcaatattttggatgagctcaactggaaatgccgcactatcttttttaaattgcagcgtccctttacccgtttgataaggcgcgacttcttttgcaaaatgagccatcggttgattcgttggatagaaaccaacatggcgcttgttaatgccaaaataacaaagtgccttaggttggtagtagccaactaatccgtaggccaatttaacttcggcatccggcaacgccgtacaaataatcttgtgcattgacagtgcaagctcacgatcacgttcattttctaaaccagccaaatattgtgtcacattatccattttagccccacctctattttgctatcatcttaacacaagccttcaaaaaaatgccaataaaaaaagcccaaccgaagttggacttttttgataaataataattatttaacagctggtgtaccgaaccattcgatacgtgattcaactgtgtctttgattgcttttgtaccaggtgcaagaactttacgaggatcaaagcctttttcagcttcgtctttgtctgcagcgtagtatgctttaacagcttttgaccatgcaatttgttgttctgtattaacgttaaccttagcaatacccatgtcgattgctttaaggatttgttccttaggaatacctgaaccaccgtgtaatacaagaggaatcttgatttcagcagctaattcttctaaacggtcaaagcttaaaccttgccagttttcagggtatacaccgtgaatgttaccaataccaacagctaagtagtcaggaccagcagctgctaattgtttagcttcttcaacatcagctaattcaccagcaccaacgataccgtcttcttcgccaccaattgaaccaacttcggcttcaactgagatacctttagcatgtgctaaagcaacgatttcttttgtctttgctaagttttcttcgaatggtaaatcatgaccatcgaacataactgagttgtaaccaacttcgatacattctttagcagcttcgtagttaccgtgatctaaatgcatgataacaggaacagtgatgttcattgacttgattgtttgttcaaccaagttcttgcataattcgtaaccacccatatatttagcagcacccattgatgtttggatcaagattggtgtgttagtttcttgagcagcgcctaagatagcacgtgtccattcaaggttgtttgtgttgaaagcaccaacagcgtaatgaccttcacgagcagctttaaagatttctgtaccattaactaatgacatgaaaaagcctccagattaattgcaactttttagttgcgatttttgaatacgagtctattttaccatatttttgctgaatatgaatcacctttgacaactttctgaaaatgaaaacgaattcaatctttcaacccaattctgactggttttgtgcttaattatcaaatgaaaaaataaataacgacaataataacaccccatagtaatagtgatattggcagcccataaattagccctttaaacaatgattttccctcttaacgtccgtattgacgcaaaaagaagaaaatttagcgtcattagcgctaaactttcttcttctacttgttgttgctatttaatttaagatgcccccggcgagaatcgaactcgcaacctatcgcttaggaggcgattgctctatccagttgagccacgagagcctataactttcattatcgcacctcgtgaattaactgtaaagttgatttagcaatattcagtcgacatctgtcattttttgatgcatcgtttcaactccgaataagaggacggctccggctgccatcaaaatcgcaaccgtgaagatcgtaaaaatcactgtgattgagactttttgattgatgagatagccgactaaaaacggtccgacaatcccaccaatccgcccaactgctgcggctaatccacttccgctgccacgaataatggctggatattgttctggtgtgtaggcgtacaacgcgccccacgcacccaagttgaaaaaggataacaaggcgccagcactaattaatagaccgactgattgggcggtaccaaagaaataggcactgattgccgttccaattaagaaactaccgaggacccatttacgtccccacttttcaattaaccaagctgcaaaaaagtagccgggtagctgcgccaaggtcatgattaagacgtaaccaaaactgttgaccaaactaaaacctttgagcaccatgacgcttggtaaccagagaaacattccataataagaaaagacgactaagaaccacacaaaccataataaagccgttttttggcggtaagctggttgccacaatttcgtaacgcgctgcataaagggcaatggcttttgaatcgtggctggttcgtggctatccttgacgtgctcccgaaggaccaacgtgtaaacagcggggagtgacgtaatcaataagacaacgcgccaaccccaattaggaatcacaaaatatgccagtaaactagccgctaaccaaccggccgcccagaaactctctagtaagacgactgcccgcccacgtgttgcgtccggtgtattctctgaaattaacgtcgaagcaactggtaactcgccacccaaaccgatacccactaataaccgtaaggccatgaagacgattaatgatgggctaagcgccgataagccgttcccaattgaaaaaagtaatagcgagaatagtaaactattccgccgcccaattttatcagccaaggcgccgaagaagacagcaccaatcgccatcccgattgagccaacactgccaattaaacccatttgaccactgttaaggtgccattctttagcgagggccgcgattacaaacgatagtaagcccacgtccatcgcatcaaacagccaggccccaccagctgcccataatagtttgtgatgttcttttgtcatctcaaatccgcctccaaagttgataataattgtgtttatcatacttcttaggtttacaggtgtcaagacaccctaattattaacgtagagaatatcaagtgctgacaaggccgcttttatccgttcaaaatcctgttcagaagcgcattcgatggtgtggaggtgaatcccaccagtgagtgttgagagtagtttttgttcgggatattttttaattttttgcataaaccctttgacatctgtcaagttgttgatgcctaattgccccgttatttcgccgtagacttgatgatcaactgtaacgtcaatcactcgcccgccgttttgaacaatggcggttaattcagcgcgcgtcttggcttgtgtatgctgacacactaattgtgcgcgataaccggtgatttgttgggttgtcgtttgataataatagccgctgaccgtcgcaataatattgacaccctgcgcgcgaattaacgcaatatcgcccacaattgtctggcgactcacgtgataagtctgcgctagttgcttggcactaatcggttggccactgtctttaatcgccgctaaaatggcgtctcttctttgttgggttgtcattaccacacctcgttttatctaatacagctattttaagcgcaatcgcacaaaaaaggaagtgcgtttgaaacgggttggcttcgagcattagcaccgctcggcgaataactgctgcaagcagttgtttgacgagtgacgctaagcacagaaagctactgacaaaaaacggtaaaaccatccatatccgaatatcaaaaaagacctaggacaaaaatcacttttgtcctaggtcttcatttttttaatttaattgttgtccgttacttcgaatgacgcgttggtaccaataaaagctgtccttaggatagcgattgagttccttttcgtcggtttcatctcgatcaacatagacaaaaccgtagcgcttctgataaccattcgtccaactcaataaatccgtgaaactccaggttgtgtaaccaatgacggtcacgccatctgtaatggcttcttggattgcttgaatgtgagcctttaaaaaggcaatgcggtaatcatcgtgcacttcaccagcaccatctaggcgatcataagcacccaaaccattttcggtaattaaaaccggtaagctataacgactctcaatgcgccgtaatgccattctaagtccttctgggtcaatattccaatcccagtcggtttgttgcatatacggattgtcagccgtcttgaaaagccctggcacaccgctcgcttgactcgttccttttttaccggaagtattttgtttggttaacccaacgccaccgaccaacggattagccgttacggttgtcgtttggtaatagttgagtcccatgaaatcaggccgggctaatgggtcttgtagtaatgcttggtctgctgccgtgatatctggcagcagtccttcacgcgcccaataatttagaattaacttcggatagcgaccccaagcataaacatccaaccataaatcggcattcaattgctcagcatcatcagccgcaatctggttcactggatcagcatctagggcataggttggactataggcaaaactaggaccaatcccaccttgataacctttttcgtggaacaacttaatagcactcgcattggctaaattggccatatgattggcttggtaagtccgtttagcatccatcactgctggtggatgttctgcggttaaatagccgtgcgtgatgaagatattttgttcgttcaaggttacccagtgacgcacacgatcgccaaaacgttcgaataataaggctgcataagctgtaaaatccggaataatctgccgagattcccaaccaccatattcctcttgcaaggcttggggtaagtcccaatgataaattgtaacaatcggttcgatctgattagcaattaattcatcgattaagcgatcataaaaggccaacccctcttcattcacagtacctcgcccgtcaggcaatacccgtggccacgaaattgagaagcgataggctttcaagccagctcgggccatcaacgcgacatcttctcgataacgatgatagtgatcaaccgcgacatccccattagtttccttgaaggtcttcccaggaatacgaacaaactggtcccagacagactgacccttacccgcttcttgataagccccttcaatctgataggccgccgaagctgaaccccatagaaaatcttgtgggaatggtgctaattgttgatattccataatcaaactctctccttatcccgctagatatgacttttcaatttgcttcaacatttttttgaagccccgttttctcataaagcctaaaacggcacccatcaataaatcatttgtttgttgtaatttactgtttgccttggcttgttcccggtaaatcacttggattgcttgggggccattggcaaaaatatcataactcgattggtaagtccctcgtgatgaggttgtttcgtagtgatagctctgatccttgatcaattgagtgaccttcagcattgctttaccacgattaccaaacgatttttgatacgaataattagcaagttgcgcttcggtaattttttcgccggtttgttgtttgatatcaaataaaacagacgtcataatcttctgatagaaatcactcgcaggcatactcaaattttgtttaatttccataacgcaatcacgctctttctctaaatttagtacgtttcaacaggtaaaccagccatcttacgatagacatcaacaacttcgccggcaaggtctctgaacgtaatagcgttcattaaatgatcttgagaatgaacggttagtaaagtgacatcaatatggtcgccactggcttccttagttaacatccctgtttggacattgtgtgcttctgataatgcagcgtctgattcttgtaatttagcagcagcttggtcaaagtcacccttcttagcggcctgaattgcttccattgcactacttttggcgttcccaccattaataatcaatcccatgattgtttctaagttttgttcatctgccattgtcggcacctcctaaaatttagctcgtcactgactttcacgtttgcctctagttgttccaaggccgttagcgataactgaggtctaacgtggtcttgtccaatttagataaaaggcttacaaattaaaaatcaatttccagcgagtccgttcgctcaagtgtccgtcaaacgaaataaaagccttacttacattgtaaacgcttaactaaaattgtcaataaatagcttgcccactccctcacaatgccgaccaaataaaaaagaaacctcaactaaattaaggtttcttctctgtttgggctagaccgttaaatctttgtttttcttgtgatagcccttattcttttgatcgcgtttacgatttttcttacgttttggctttaatggttcagcaggttggcgagttggcactggtttcttagccacttttgtcttacttcgttcacccattggtttgtcatcagcaaccggtgttttcgttggttgttgcgttggtgtggcagcatttttttgaactggtgcggcttccttcacaactgctggttttgtttcttccaaatgatcgccgaccaaataacgggtcactaaatcatattctggcgctaacaatttccgcaagttacggccatcatgttggttccccaacgttaataccgttccttcacggcccatccgaccagtccgaccagcccgatgaatataggtaatcttagcattaggcacgtcaaagttaatgacatatggtaagtcagtaatatctaagccccgcccagcaacatctgtcgctaaaagcagttgaatcttaccttcacggaagtcttttaacgccttttgccgttctgtttggcgtccttggccggataaagcagcatatgttaccttttggtgtttcaaggtttgagctgcttgtagtaattgggcagattggttgaaaattaccaagcctctaaaattcttttggtgcgctaaatgccgtaagacattcactttttgcgcgttaccagttggaatgaaggcgtgtaatacgtccccaccagttttgtcgattgaccgcacatcaattgtttcgattgggaccccaaaccaagtttctaaatcggttaatgtgtccgttgaagttgctgagaaaaagcccaattgcacatcagctggtgattcttgcacaatgtggcgggtttctgataagccactgtccgttaataattcatccgcttcatccatgataatggcttgtagcgtatggaattttatcttgcgttgttcgctgagttccaataaacgcccagtggttgcaacgataatttctggtttagtcttgagccgttcgatttggcgcttaacgttggccttcccagtaatcgcttgaacgttacaatcaattgctttcgcgtaaggttgaatcacatcccgtgtttgaatcacgagttcttgtgaaggggccaagatgaggacttggagaccttcaccgggcataatcttttccaataaaggtagtgaaaacgcaagcgtcttcccggaaccggttggggctaggcccaaaattgatttatcctgttttaaaggttggtaaactgcttcttgaattggggaaaggtccttaaacccttgttcatcccatagtgcttgaaataatggtgaaacgctcatgtattgcctccgttaatgttgatctgcatcaaactggatcccggccgattgtcttaattgatataaaacggcattgaccgattgacttagttgtaataattcatgataccgttttgtgtcgcgattagcaataatcgttgcaaaagttgccgcttcagccatcatcggattagcaagtgattgttcaccaagtgacgtgattttttggccaccctcttcatataaatcaacttggccaatcgtaccagcattatccaaaacaattgtgctttggccgccataaatttctgatgttaagtatgaatccactgtcttaccaaagattaaagtcacatcgtagtctgggtaatgaagcgttgcgaccccttttccgtcaaccttagttggtaacatttcagcttgataatcaaccgcaattggttggccaaaccagctgagtgcagcataaacaacgtaaacgcctaaatcttgtaaggcaccacctgaaaaatgaggtgagaaaatattgggttcttcccccgctaaaaccgcatcatagcgagatgagtatttcatatacgataaggttgcgccgttgatgcttggtaatttagcaattgcgtcttgcacaattttgaaattagcttcatggatttggcgcgctgcctcaaatagaaactgatcgggatgatccgctaatatagcaatcatatctgccatttcatccggattactgaaagccggcttttcgacaatcacatttttaccggcttcaattgcttgtttggcttgtttaaaatgtaaactgttgggggatgcaatataaacggtttcaaaaccccggcttccaaaaaagccagtgagggttgtatacgtatttgcttcaggggcagtatagtctgttttaaattgctctgccttttcttcagttcttgaataaaccgctgtcaattcgaacgcttctgcctcacgtgcagcattcacaaattgtcctgtaatccagtttgtaccaataatgcctaatttttgcatgtcagtcaactccttcaattaatagttttagtatacgggttttcgttagaaaaacctattaaaatcaactactagttagtggcctcaattaagtattttaataaataatcgcgttctttaataattcttaataaaatccgccttaagaccgataattaattgcacgcaaggcacgtaattcgtgctaaaatagagagtaattgaggtgtgactatgcgaatttttgaatttaaaaaaccacgagaattatttgatcaaacgattcatcaatatcaacaaaaggcccggtccactcaagccagtaaaacagcaactttttacgcgggtcattggactttcgatgatgaaaaaacgcataaacgacatacgcttgaaatcacgccaaacttactcatccagattgatcacaaaccactaactggcaaagtaattttattaagtgaaaccgagcttatttttctcgaccattttggttaccaactcaaaattacatgtgaaaaccaccaaccggtttcaatctacgacgaagcagaagacacggaatacccaatcaaataaagagtgctcttttcaaccgttttgattctgagcatttgtgtcgcttggcgaattagcgatgcaatcgctgatttgacaagtgttacaaagcacaggaatcaggttgaaaagacacgtttcaaatctgagtgcttttattcacgttttggctctgagcattaactgagcgtgctgaatgaccgatgaaatcggtcgtttagtacgcgtggttaagcacaagaggcagtgaataaaagccaatccatacataaagaagccgcccaaaataatttgggcgacttctttttttacctatttaattgtttagccaatgccttttcggctgcttttggtaaatcagctttgtctaccttttgccatgacatcacacctttgcgatcgttaacctttaattcaaggtaggcttgtttttgtaagcgtgaacttttagcactattaaagctcacctttttttgatggccagcctgatcgtatgcgggcaggtcgtattggtaagaaacatatgatttaccttctgtgtccttatcgacctgcttcgtgccgtcagttgtaatttgtgtgtaataggtttcaccaccgtaataatattccttaattccccagctaccgccaataaagaaaatcacgatgatgattaataataaccagcctttgcgtttaaacatatttaggctccatttctatttaagtttttgccattcttgcggcgtaccggtgaaaaccgccaattgatattctgagtcgtctcggccaccaggtattttgctggcagtggtatactgccaaaaaccgttcttagtgccaactgttggccgttgttgcgttgtttgccacagtggataagtgcccttggttgggacatagcgcttcaataatgccggcgcaccaccgatgatacaatcttggtgataatactgattaacgagcgtcacaaaccgggcaattgcccgttgcgtcttggcttttgccggtggtttttgtgcgtaatcattgtaataggaaagataaaccataattggtagatgtccggtatcttgcccgactgatttgataaattgttgcgcctggtcttcaggtgagctatcaaaactaaaaaagtgataaacccccactgacatacccgagccctctgcccgactgtaattactatcgaaattatcatccttataggaagccccttcggtcgcttttagataaacgaattttaggctttcttttttcaaaatctgataatcttggtagccatcttcttggctaatttgagcccctaagacgggatattgttgctcgttaggccggtcggttcgattctggagccaccaccaaataccggtgatcactgcaatcgctaagaggcttagtaaaactattcggcgccagtagcgcttttgaaaactatcttgaaaaatcggcgtcattcgacgtttcatcgtttcaccccaacttaagcttagtacgcttagtttactattttcattaactgcaaacaagcgacctaacaattttgttcgtcgttgtcacttttgtttgccttttcacttgaatggtctacaatatgttcaaaggaggcggattatgctagatgagcgtttactggggttaacattccagctgcccgatgcacaatcggcgggcgtgatttcttttttcggcgtcttatatcattaccgtgttgcgggaccagcggaaactggtctactggttgtcgtcactgatgtatcaccattatacttaacagttacggcccaacacaatgttttagaatactagttttacttaggagaggaagtttttagtatgggtatttttctaacgattttattaattgtcattttggttttaattgccatcactttattctcatcttttgccttgattcatactggtgaagtgggcattttagaacgacttggggtttacgtgaagaccttggaacctggtttccaccttgtcttcccatttttataccacatcactgaagtagttaacatgaaacaaattccgttaaaagtagcggaacaagaagttatcactaaggataacgttgtggtcatgatttcagaaacacttaaataccacatcacagatgttaattcatatgtttacaagaataaggattctgttttgagtatggtacaagatactcgggcccaactgcgtgggattatcgggaatatggatttaaacgatgttttaaacgggacagaacaaattaatcacaccctttttgaacaattgagtgctgtgaccgccggctacggtttaaatgttgatcgggtcaatatcgattccattcaagtcgcacatgatattcaagaatcaatgaacaaattactccgtgcttctcgtgaaaaagaagccaatattatggaagctgaagggctcaaagccgctgccatccgtaaggctgaaggggttaaggaagccaatattctagaagccgaagctaacaagcaaacccaaatcttggaagctgaagggaaagcgcaaagtcaaagaaccgtcgctgaagcggttaaggatcaaattaacttaatcaactctagtttggtgaataacggcgaactttacttgcaattcaagaacatcgaagcaatggaacacgttgccgatggccaaaataacaccatcgtgctccctaacaaagcaattgacagcttaggtagcctcccagcagttggcgaattattagcaaataaagacaagcatctataacatacaaaagaagcggcggacaatatatttgtccgccgcttctttttggtatccgaataattatcgttttaacgtgttctataagttacacttctttttttagtgctcttgctcgtcatccgaattggcccccgcttttggcggttgattcattcgattggtcgtcttacttaaaatatattgctcgagtagattgataatctgctggttctgcggtaaatcggagtgttgcgcttgatccccggtaaccgtgatttccgtataatgcttgacttgaccctgataaatatacttaccagcctcaacactacgagccggcacaatcccatcattttcgaagttctcagtccccgcgatggaatacatcgacaagttcgagggaatcttcttccgattggcgataaaatccgttaacatttgcgatttatgggccagcgacgtttcttcgaaattatagggtgagccaatcgtcattaattttttaacggtaatgtcatcccgattgaagtaattctctaaaaaggcggtgtagatcaaaccaccgttcgaatgcccgactgctttaaaattattaaactggtatttcttggctaacgccgtaaacgcgattgagaaccatttagcctgtttcttgatattactgtagccatctttgttattttcaaagccaaccacgataaaaggttcgttatcccgcggcttaatttcgccagaataactgatgtgattattggtatccacggttagtttcaataaactatgcttattgccccgctttttattcagtttggtaaccaactcatcaaaacgattctgagtcgcgctactcccaggaatgaagatcaccggagacattttagaatcatggcgtttagttaaagttgcgacgttttggcgcgtccattgtgcagaaggccacatcatcgcgcctaaaaatagaaaactcaagccaaggagaattaaacttttacgttgtaatttagacatcttggtcaactccttcctgcaaacgatttgcaagttggatgaatggtttataaattaaaacgccgacgaacacgtttagcaaactaatcaccaatgccatccagttaccgttagtcccaataaacgcctgtagcaaccccggcgttcccagtggcacgttataaaccaccgccggcatcaaattgagtgcaatcgccagggccgcaatccccatattaaccagtggcaccagcagaaacgggataatgtataacccatttcctaagactggtagtccggttaaaacggcactgttgaaattaaagaggaccggcatcaacgaccagcggccaatcaaatgctgatcacgctgacgactgaaaagaaaaatagcgattactaaagccaaggtgccaccagtcccaccaatggccccaaatggtccgtaaagtgttcctaacgtgaacggataaggtacgtgccatggtgtatggtgcaagaaggcgtaatttaggttagccgttgcggcaaacccatcacggccaaactgctcaagcgttggcatgctggttaacccaaagaatgtcaagattgtaacgagtaccccaattccgagtgaaaaaatcaaactcgtttgattggcttttaaattctgtaattttaagatgacttgatccggtagaattgaaatttccaaccagttgagtaacaaccccactaaaattgcagtgacgaccactaagctaattggcactaacgaatccaatgaacgccccacaattgacccgttattcggattagcaacctgttgcgctttccctagccatctgaaaacaagacctaccagataaccgacgagtaagccgaagaagagcgcccccatccccaacaaattcgcattaaacgtcaattcaccgttgggcgtataccgcaaggctaataaaagataggccactaagcctgtgatgcttgccagttgttcgtcccgaccataatacttggccgtatagcgcgctgttgcaaaagctgcgattgctgccacaatccctaaggttaaactcgttagactattaaacggcacctgcatataattatgcttcgttaaccaagttgaaaagtggaaaatactggcgataaaactatggcgattaaataatgtcagttgaattaattggcttaaactaccgattaacacaaacggaaacaacaacgttaaactcctttgaataatttgatacaatggatgattggtttgaacccgcgtgatccattgcccaaataacagtaatttagattgaacgattactttcatctgttaaccctcttatcatttctcttattggctttattctagtcgaaacgattctattttgcacgcctttcttccctagaccactaaaaaggccgtctaaccctcgatgatgaggattaaacggcctttttagtggtctttaaagctgattcttgtgtttaacagataatcggctgatgtcgcactctattttagtactaattttgttactgattctacgtgtaatgtttgtgggaacatgtccactggttgtgtgccttctgcttggtaaccttgtgcggctaacaagtctaagtcacgtgccaatgttgctgggttacagctgacataaaccatcttagcaggtttcaattgaccaacagcttcgataaagcttggttccaagcctttacgtggtggatcaacgattaaagcatcgacttgaaggccgtctgtttgccattgggccatcacatcttcggctttgccgagtgtgaattcaacgttatcaatcgcattgattttagcattatgacgggcatccatgacagctgattcaacgacttcaacgccgtaaacttgcttagcatgtttagccactgctaatgagattgtcccgatacctgaataagcatcgatcactgtttcattgcctgttaattcagctgcttcaattgccttttggtaaaggacttctgtttgcactgggttcacttgatagaatgattgtgctgaaatttcaaatttcaagcccattaattcatcacgaataaagtcacggccagcgattaattttgtttgatcaccaaaaatgacgtttgtttgggctgcattaacgttttgcatgatgctgaccacttctggaagagccttcttgatttcgatggcaatttcacgggcagcaggtaatttcttactacgtgtgatgaagacaatcatcatttcgtggctgtaataaccgcgacgaaccatgattgttctcaaaacacccttatgcgtatcttcattgtatggatcgatgtagaaacgacgtaagatatcacgaaccactttgattgcttcatcaatcttaggatcttggatgtagaaatcttccattggcatcacttggtgactgtgtttccggtagaaaccggtcattaaggcaccatcgataaaccgaacaggtacttgagccttgttacggtaaccagttggatcagtcatcccaagtgtaggttggactggaatatccaaatgcgctttttggaaaacatttaagatttgattgcgtttaaacgttaattgcgctgggtatgccaagtgttgaagtggtgcgatcccagtttgtgagtagatattagcttttgattcaacacgatctgggcttttctttaataagttaaccaaacgtgcgaaaccgtattgtttgttgacctttgtgacttctacttcggcttgttcatcaggtaaaacaccttcgatgaataatgggtaattgtcaactttggcaacacccatgccttcataggtcaaatccataatatcgaccgttaacttttcattttttcttactggtgcttgaattttcatagtaacctcttttttgttgtttaaaaagagtctgaaacaaaactgagttttgcgccggactcttttcgcctaatagtttagtttaacctattttaccgtcaccgtcgatatcttcttttgatatttcttcgacttctttgacgaattgatcttctgctgcaagctcttctggtgtctccgttgtgattgcgtgatctggaatggcctctttattaacgtacatttcgatgtgttgttgtaagttaataaaagtcattggcgcatcgccaccgtattcaccatctagattaatcatcatcttgtcgttttcgtcagctggtcgagccactaacttagacgtcttcgtataaataatccgtggatcatcaacgtgcttgccaccttttaggacaagtgccatcagatgaaccaattcagccatattagccgtcttcacgacgattaatgaaaaattaccgtcatccagttgggcatctggcgccacctgttcgaacccaccgacagaattcgtcaagcctaataagaagagtgatgcttgaccatcataagtcccttcatcgtattcaagatgcatttgaatgggcttaatctgaggcaacatttctgcgcctttgacgatatacgctaaataaccaaagattgatttgaaatcagaaggtacttcatacgtcaactctgtcaacaagccgcccccggcgatgttcataaaataattatcgtttgcttgaccgatatccattttgagcgtttgattttttaaaatcactttcgctgcatcgactggattgtcacgtggaatcttcaaagcgcgcgcgtaatcatttgttgtcccggcaggaataattgccattttagggcgtttagccagtccggcaatcccgttgaccacttcgttgatcgtgccatcaccgccggcggcaaccactaaatcaaaatcatctttagcagcacgtgtcgcttctttttgcgcagatgctggttcaggtgttgtttgataagcgctcgcttcataacccgcttgttctaaaatatccagaatatcagcaacacttcgcttcattacttcatgtcctgaagttggattataaattaaccgtgcacgtttttgcatatgaatctcctaattctcgattatcgtttatttaattcagccatcaataaatcattaacaactttcggattagcttgaccgcgtgtttccttcataatcttaccgactaagaagccaactgcccggtctttaccatttttgaaatcgtcaattgattgttgattatcatcaaggatccctgtgatgattggtgtcaacttagcagggtctgataattgaaccatccctttagcttcaacccacgcttttggatccgtatcattttggataatttcttggaagacctttttagcaatcttcgatgaaataataccgtctttgatcaagttgatcatttgagctaaatgttctggtgttaatgcggtttcttgaaggtcaatttgcttgtcgttcaagtaagcattcacttcgcccatcaaccagttagaaacttgtttaggtgcggcaccgttggcaacagctgcttcaaagaagtcagacatttccttcgtgttcgttaagacacccgcatcatattctggtaagcctaattcatcaacataccgtgtccggcgtttagcaggcatttcaggcatattgtcttgcacttctttcaaccagtcatcgccaatgtgcattggtggtagatctggttctgggaagtaacggtaatcatccgcaccagatttaacccgcattaagtaggtttcgcctgatttttcatcaaaacgacgagtttctggacgaattgtttcaccagcaatcaagagttgtgattgacgcttgatttcataagccaaccctaaacggacatggttaaatgagttcaagtttttcaattctgatttaacaccatatttcttagcgccgattggtcgcacagaaatattggtatccacccgcattgacccttcttccatcttaacatcagatgcgcccgtaaattgaacgatttgacgtaaggtttcaaggtaagcataggcttcttcaggtgttgacatatcaggttttgagacgatttcgatcaaggctgttccttgacggtttaaatcgacgtatgaatagccgtctgaaccatgcgtattcttaccagcatcttcttcgacgtgcaattcagcaatcccgatttgttttttgtgaccatcaatctcgacttcaatataaccgtctttaccaaggggttgttcgtattgtgtgatttgataagcctttggattatctgggtagaaataatttttccggtcaaaatgtgtatcacgggcaatatcagcatgtagtgctgttgcgaccatcatcccaagcgtgtaagcacccttgttcaaagttggcaatgtcccaggataaccccagtcgataacattcgtgttggtattaggttctgcaccataattaacaggagatggactgtacatttttgagttggtttttaattcaatatgcacttcaagtccgattgttgtttcgaaattcattaggcttgtcctcctttaaagcttggtacgtttttgttaaattctgtggcttgttcaaaggcgtaaccggcacgataaactgattcttcgtcgaaggctttcccgatgatttgtaaaccaactggcatcccatcaacaagaccagcaggtactgacattgctggtaagccagccatgttagcaggaatcgttaagatatcattcatgtacattgtgacaggatccgtgcccttgtcacctaacttgaaggcagttgttggtgttgtaggacccacaactaaatcgtaatcttcgaagaccttttcgaaatcttgaataatcaaggtccgcatttgacccgcttttttgaagtaagcatcatagaaacctgatgataaagcaaatgtgccaagcataatccggcgtttcacttcatcgccaaagccttcagaacgtgatttaacgtaaacatcttcaagcgtcttagcttcaggtgaacggtagccgtaacgaatcccgtcaaaacgtgacaagttagatgaggcttcacttgaagcaatgatgtagtaagtttgaaccgcatattgagaatgtggcaagctaacttcttcaaccgttgcacccaatgacttgaaagtttcgatagctgtttcgatttgggccttaacagctggttcaacaccttctgccatatattctttggcaacggcaatcttcatgcccttgatgtcgccgtttaaagcagcccggaaatcaggtacgtcataatcagcactggtactgtctttttcatcatgaccactgatggcttgtaaaacagttgcgttatcagcaacagttcgactgaagacaccgacttgatcaagacttgaagcaaaagcaatcgcaccccaacgtgacacacggccataagttggtttgataccgacaatcccgttaaaagcagcgggttggcgaattgaaccaccagtatctgtccctaaagcagcgaccacttcacccgcggcaacagctgctgcagaaccacctgaagaaccgccaggcactttatcaaggtcccaagggtttttagtcttcttaaaggcagatgtttctgttgaagaacccatggcaaattcatctaagttggttttaccaatcatgatggcctttttagcctttaatttttcaacaacagtcgcatcaaaaacgggtttgaagttagcaagcatcttgctagcagctgtcgttgtgacaccgtctgtcaataagttatctttaatcccaattggcatccctgctaataagttatcagcatcgattggttgcgcatcgattttggcagctgcttcttgagcgcctttttcatcgatggttaagaaagcatcaacttgttgttctttggttttaatcgtttctaatgtatccgttactaattgactagccgttaagtcaccagcaactagtttgtcatgaacactttgtaaatcttcgtttaaataatccacggttaggcttcctccttgtccatgatggcagggactttcaataagccgtctgctgaatctggtgcattcttcattaagatttcacgatctgtccctggttgggcaacatcttcgcgaacaatgttcttgaggccatttacatgagtcgttacgggaacacctgtggtatccacttcgtttaattcatcagtcattttcatgatgtcggcaagttgttcagtgaattgttctaattgttcatcactgaaagctaatttggaaagttctgcgacatgctgaacttgttttttatcaatcatgagtaaaccccttttctaattcagtcactatttatccattctgattaattttaccatatattgccctagatgaaagtgacatcccccggaatttggtcgttttctataacttattcatgtaatcgttaccattagttgctatctcaaactttttaccctaattagttttatcattactggtaacaatatatcttatacaactcattagtaatcgatatgattcataacaatgaatggtagacaaccatacgttcaaacttatataattgactagacaaatacgttagaagaaataatcatttaaccattattacaaggaggaacttattatgaccattacatcatttactcgttttttagccgttgctagccttagcctattcgccggactaacaattcaacatcaatccgtttcagctgctacttctactgtcggtgttactttctcaggcatcaccccagaaatgcaagcaaaagctgcagaagaacgggcggctgaagaagaggtgaatgatgcttggctagatatggacttcaccgacgattctcctgttgaagttgaagaaactgtcaacggtcaaacacagcactattgggaatatgctgatggcacaacaagccaaacagcacctgccgaaacagctgatactgaagacgttgcaacaacaacccaaacagctgctcagcctactgcagaagcagcacctgccgttagcgaacaacaaacaccagaagcagcaactactactactaaacaaacagcaacacctgttaaaaaagcacaacctaaaaaagaaaagttcaaaccaatgccaagtgttgcaacgattaagcaactcacatttgactgggcttcagcacaagtgatgcaacccctagaaaaaatgatcgcacatgctatcaaaggcctataattaaaaaaagctcccggcaatcaactgattgccgggagctttttgaatctcttatttaataactaccgaaaacgtgtgtggtaaagcctttgctgcctgatgcacgcccaacataggcttgcatcccttccgcagatgtaattgagatatcaagcggaatgttacgcggtaaatacttatccgcggccgtcgcaatatactgtgtaaaactcataatttccgtttcactgtagaattgcgtattaaccgtgatattcatgcctgctaagacgccttcttcataatgcgtctgagcagtcacaccacttaagttcgggaagaacgtttcaacttgtgttttaaaactgttaaaagctgtcgcgtcgtcttgattaattgctttttcatcatttacaactggtagcacttgattttcttgattcaattcgtgccatgaatcaatcgttgtgctgccttttttgctgaccccataagcgaagaatgtgccaccaactaaactatccttaggggcttgtttataaagtccaatgacaattgtcgtatcgctgaggcccttcttttgacgcatccggcttaaaactttattagccatttgtttgccttgttgcgtcatcatcgcttttgaaatcttcgtttcaaatgttgcaccgtattgttccttggtatagtaatcaacttgattcatccctaggccaatactcatgcctttcatactgccatcttcacctaaataatcttgttccaatatttgttggagataaattggattccgtttattcggatctttttggccattatcttcggggtttaagccctctgtattcgttttagatttacgtgctaaccatttttgcgcttgggcggtctttaaactttgcccttcttggaaaacatattttgaagtgggaaattgttccttggatagtttaagaagcccactctcaagactcttaacatcaaaagaggtgttactctgttgcgttgttaatccccgagtctggctagttttatactgaccattatcaattacgccttcatacatactatcggtcactttacccgttgtttgtaattttttagtcgctttactacttgaactcgatgaagtgcctggaagacttgtgcaacctgctaacaataaaagagttgctgctgcaacgacccatattttatactttgccactgagaatggtgcctccttaattccgattaaagcgcgttaaatgaattaaacgcgcgctcttggttattataccgaactttacctactgcgccaaataattatctaaatcagcttcgttaataacggggattgccaatgactgtgctttttcaagtttgctaccggcatcttgccccgcaattaacgcatccgtcttcttagaaacagaccctgtgaccttcgcgccgttgtcttcaagcaattgcttcaattcaccacgcgtatactgttctaacttacctgttaaaacaaccgtcttaccgttaaagtagctgtcactagttgccgcttgggctttagtaacacccgtataggttaaattaacaccgactgcttctaattctgccatcaaggtttgcacctgactatccgcaaaataagtcacaaggctgtcagcaataatcgtgccaatcgtatcaaccgtaatgatagtttcttgatcactcgccatcaaggctgctaatgtttggaaatgttcagccaataaacgggcagctttagcgcccacatggcgaatccctaacccaaataataacctttctagcgaattctggcgactagcatcgattgcatttaataaattattaatagatttttctttaaatttatccaattgggctaaatcatccgctgttaaccggtataaatcggccacatcgtggatcaactcttttgccaacaattgggtaataatccgtggccctaagccatcgatattcatcgcgttccgagaagcaaaatgggtgagttgttccttcatttgagccggacacattggattaatgcaacgcaacgctacttcttcatccaaatggaccaaatcgtgcccacatgatggacaagtcgttggtacggcataaacttgactatcgctaggacgcttgtctaaaacaacttgcgaaatttctggaataatatctcccgctttgtgcaagagcactgtatcaagcaatcgaacatctttatcgcgtaacatatccgcattgtgtaatgatgctcgtgaaacggtcgtcccagctagttgaaccggatccataaccgcggttggtgtcacaaccccagttcggccaacggtccattcgatttcacgaacgacggtctctgcttcttcaggtgggaatttataggcaatttcccagcgtggcactttaaccgtgttgcctaattgacgttggagcgcaagatcatttacttttaaaacaaccccatcaatgccatacgccaaatcgttccgtgtcccttggtattgttcgataaacgcctgtacctcagccatattttggcagacaacagacgttgggttcacgttaaaacctaattcagctaaaacatggagggcctcactttgcgttgtcgcctgcacatcatcaaacgtgacaatcgtatagataaaggcactcaattgacgcgcagctgccaccttagcatccaattggcgtaaactaccagccgccgcgttccgtggattagcaaacggttcttggccttctgcttcccgtttttgattcaaatctgcaaaagccgctttgggcatgtaacattcaccgcggacctcaattgaaacgggacgcgttagtttttgcggaatcgccttgattgtctttaaattctgagtaatatcttcaccaattgtcccgttaccacgcgtggccccccggacaaagcggcctttttcataaattaaatcaatcgctaagccatcgatttttaactcgacattatactcgatttccgttgccgtattttttcgtaaccgttggtcaaacgctgccaactcggcttcagaaaagacatcccccatcgataacatgggaatctcatgcgtgacctttgtaaaacctggtaagacttggccaccgactttttgagttggtgaatcattggtcacaatcaccggaaaagcggcttcgagctgctctaaatcacgatacaactcatcgtacacatgatcttccactaagggcgcatcctgtgtatagtacgcctgactgtagtcggctaattgatcgcgcaattgttgcgcaagtgaagccgcctcactctgggtataatcttcaactggtttggctaaacccatattggacactcctttgttggattgaaacgtgctctgttaggcatactcttccggttattcacggtattacactaatcatcagagtataatcgcctgcttgcgcactttattctactttttctattggtgcgaagcttgctagtagtctcttgacaccttgttccttgaaggcgatgtctagttcttggtcgccgcctgtgccgttgaccttgacgactgtgccaatgccccacttcttatgttggactttttggcccgcttgccaactaccactcttatcgccaccggttgtatcggcaattttatgactagtggttgttttaggcccgttatacgtcgtagcggttgctctggcgtagctattcgacttgccaaatggtagcttacgttctggaatactgccggcattgccgttcgcgtaatccaataatttatcatcaatttcaccaacaaatcgtgaagcttggttactttgttgacgaccatacaacatccgtgaataagcattcgttaaataaagcttactttcagcacgggtaattccaacatacgccaaacgccgttcttcttctaactcgtcttcttccaataacgcccgtgatagtgggaaaataccttcttccatccccattaaaaagactactgggaactcaaggcctttagccgcatgcaaggtcatcatcgtgacttcactagcttcttcttcaacagaatccaaatcagaaaccaatgataattccgctaagaagtccacaaataaatcactgtcttcttcttcgggttcataatgctcatcaaattgtttcgttacagatagtaattcttcaatattttctaaacgggtttgtgattctaatgtattttcaacttcaagtgccttcttgtacccagtcttgtccaataattgttcagtcaagttcgtcacgtttaagaattcacgcatcttcgctaaatcgccaatgacgttcccaaagtcgattaaagtattgcgacttctagcgggaatcgttgataattcagcattttgtgccgcttccaataatgaccattggtgatcatcggcaaactgccctaatttttcaagcgtgccagggccaatcccccgtttagggctgttgacgatccgttcaaaactcattgaatcggccgcattaacgactaaacgtaaataagcgaggatatccttaatttctttccggtcgtagaatttgtgtccgccgaccattttataaggcatgttagctttaacaaacgcttcttcaattgtccgagattgcgcattagtccgataaagcactgcaaagtcgccgtatttacggttatttttttgcatttcttcttgaatcttcgtgatgacaaataaagattcgtcgcgttcactctggccccgataatacgtaatcggttggccttcttcattttgcgtccacaattcctttggtttccggaaagtattgcggttaatgaccccattagcggcttccaaaatggtcttggttgaccggtaattttgttccaacatcactgatttagcgtctggataatcatgttcaaagttcatgatattgctgatatcagcaccccgccaaccgtaaatactttgatcggcatccccaacaacacagagattttgatacttctcagctaacatattcaccaatgtgtattgcgcttcattagtatcttgatattcgtcaacgtgaatgtattggaatttttcttgataatgtgccaaagtttccttattttctctaaataagcgaattgtttgcatgattaaatcatcaaaatcaagtgcttggttttgatggagtcgtttttggtattctgtatagcatttggccgccatcttttcaaatggcccattcgctaaaccttgatagtccgctggtgtttgaagcgcattttttgctttactgattgtccctaaaattgctttgggttcatattttttagtatcgatatttaagtcccgacaaacatggcgcatcaacgtcaattgttcagaaggatccgcaatcgtgaaggcccggttatagccgatttgttcaatttcacgtcgtaaaatccgcacacaaagggcatggaaggttgaaacccaaacatcttgagcaccttcgcctagtaagttgcccacccgttcacgcatttcgcgcgctgctttattggtaaaagtgatggctaaaattcgccatggcaatacatgtttttcttcaattaaatacgcaacacggtgcgttaacacccgcgttttaccactgccggcacccgccataattaacagtggcccttcagttgttagaaccgcctcagcttgttcgggattcattccttttaagagctcttgttcagacaaatatagtcatccttccgtaattgcaattagtctttattataacaaactagataggtagaaaaaagcgaacacgccttagtaaccggattacaattctggtcaatcttatgccttgacctgggacgcgtttcataaattatactcacattaatccaagaaaggtggcattcattatgattaaatatattttttctgacttagatggcacattgttaaaccaggcgggacaactttccgaaaaagatatcgcaacggtcaaaacaagcccgctaccaatctcattagtttcagcccgttcgccgcaagaaatgcaggcgacggttgagcaactcgcactgacaaccccacaagttgcttttaatggcggcctcatctacaaacctaccgatttattccccatggtcttagccgaatatccactcgtaacaacaactgtcgcacaactagtcgctgcattacaaaccgaatttagcgacattagtttaagtgcttatgatttacagcattggtacacacaaaaaattgatgccggaattgaaactgaggcccaactcaccgggctcttaccaaccatcattaattttgacgaccagttgaaaaatccattcattaaaatttttaaggtgatgctgatggtgccagaagatgaacaacgcacagccgttctacaattcattgaccaacttcacttacctggcctttccgtccaacaatcaggtacaatgtacgtagaaatcaccagtcaacaagccactaaagcacaggccttaatgactattctcaaaaatgccggcttgacgcccgccgactgtgctgcttttggtgcaggtcaaaacgacttatcgatgttaagcatcgtcgggcacccaattgtgatgggcaatgcaagtgatcaaattcaagctgccggtcaatttattactaaaaccaatcatcatagtggctttagctacgggattaaaaaatacattacaaaagttaatcaaaaagtaggttaaaatcatgccaaccattcgtgatattgctagaaaaagcggctattcggtttcgaccgtctcccgcgttttaaatcaacaaaaatacgtgtctgacgctgccaaagaagcgattgaagcggtcatcaagcaactggattacgtccccaatagtttggcgcgtgatttaagctttggccaaaataaaaatattggggtcgtcctaccacacaatgaccatccctatttcaatcaactcttaaatgggatcatggacgccgctttttcgagtggctatcacattgtgttactgccttctgagtacaaccgaaccgttgagctcgattacctcgagcagttgaagcggaagaattttacggcgttgatttttacctcgcacgaactgccgcttgcagttttagaagactatacacgctacggtcagattgtttgctgtgaaaatccggggcagcaccatatttcagcggtgtattccaaccgtgaaccggcctatttagccgcatttaactaccttaaatcgcttgaggttcaacaaatcgggctactcttgagtcgtaatctggccaaaagtcccacctgggtggccgtcacaggggcttatcaacaggttttccaccaaaagccaaatcagcagttgatgattggtggcatgcgctcttttgaagatggctaccgcgccgccgaacaactgattgcacgccaaccagctcttaattgctattttactaacggtgatgatattgcggctggcgtgcggcaatatcatttggaccaccaactccccgtccccattttaattgggcaggaaaagcaactctcgagtctcctcctaaaaatgccaacgattgaccatcactttttcactttagggcaaaaagcatttgaactggccctcagcaatcaacaccatgaatgtccatttgaatcggaatttatttggcgctaaaaaacgaaagtgtgccatcagtcgggtatctcctgaggattaacagagagtggcgaatgattgcgccagcaatcgtttgccattcggcattaaccgtaaagagatgactgatagaacacgtttaaactatcaaaatttgaatacaaaaaacggtgctaaagacaaaattaattttgtcccagcgccgtttttttgatgtttgagtagtgctcagagcctacccgttggcaaaaccactcttatttaaaacgtgctttttccaacaacctcttgtgcctagctttgcatcgtgaataatcgattccatcgcttattcacgacgctttgctagtgctcagagcctacccgttggcaaaaccactcttattttgaaacgtgcttttgttagcaacttcttgcgtttagtccttcagtcaaacaaccgactttgtcggttattcgcctgattagcctaatcctcagaagttacccactaacaaaaccactcttatttaaatactctgtcaaagattgtttggacttggctgaggtgccagtggtagtcgaaggcgtcgtccatttctgctggtgttaattgtgccatgacttttggatctgcttctaataattgacggaaatctttttgttcatcccatgcaagggctgttttgggttgtaccaaatcgtaagctgcttctcgacttaacccagaatcaactaacttcaataagactcgttggctgtaaatcaagccgtgcgttaaattcatgtcggctttcattttttctgggaaaacagttaatttttcaataatccgtgtgaaccggtttaagatgtaatctaataaaatcgtcgtatctggcaagataatccgttctgctgaactatgtgaaatatcccgttcatgccataatgaaacatcttccatccccgtgatgacgtgaccacgaatgacacgggctaacccactgacattttcagaactgattggattgcgtttatgtggcattgctgaagagcccttttgacctttagcaaagaattcttccacttcgcgaacttcggtacgttgtaaatgacgaatttcagtagcaaaatgttcgattgatgttgcgacaactgccattgtattaatgtaatcggcatgcaaatcacgtggcaagacttgtgttgaaatatcttgcgcccgaataccaagattttctgtcacgtaagcttcgatttctggtgagatattcgcaaaagtaccgactgccccactgattttaccagcttcaacgcctgctgcagcccgttcaaaacgttcttgattccgtttcatttcagcataccaagtcgccaatttcaaaccgaaagtcgttggttcagcatgcacaccgtgtgtccggccaatcatcaccgtattttgatattcgtaagctttttgtttcaaaacggccataaaccgttcgatatcggcccgaattaagtcgttggcttgttttaaaatatagccttgtgctgtatcaacaacatctgtagacgttaaaccgtagtgcacccatttcttttcggcacccaatgattctgaaactgcgcgagtaaaggcgaccacatcatgatgtgtaattgcttctaggcggttaatttcttcaacgtcaaagctcgcattagcgcgcactttagcggcgtcttccgctggaatatcgcctaatttagcccaggcttctacggctaaaatctcaacttctagccaagcttggtagcgattctcagtagtccagatggcacccatttctgggcgtgtataacgttctaacatgtttcttcctccaaatacgttcagttgaaagcatcaactaacggtcgatttctttttaaattaattccgctgcttcaaaattatctaatagtggttgaatattatgccctacagctgtgatataaccactttcttgcgcaccaattgtctggcaacgattgaaataccaatccggcttaatcttcatttgtgtttgaatcagtggccattgttctggcgttgttcttaaacaaacacccgcattatttaagcgtgaagggccaattgctaactggcaaatcgcctttaagtggtattcatattgtgaaaagttcaaaatgcggttaagcacatccccagtttcatgtggtgcggtgacaattcgcttaacgtagatgttcatatccgcggtcaagaagaattcaatcccgaagatgcccatataatctaggttttgcccaatcacagtcgctaagcgttcaatttcttctgcgacatcttgatcgatgcgtgccggcgtaattgataattgtaaatcttggtcttgcatctgattttcaataatcggtaacgtgacaacttggccttcataatccttggcaaccatcacggccaattcttgttgtttagggacccatgattctaataagtaggcacccaattccaacgtatcatccatcttggccaaatcggctggtgattcaaggtattgatgatattgccgaccgaagccgcgttgaatcggttttaaaatacagggatagccaattgaatcaaccccttgttcaatatccgtcttatcaaccaccgtcacatatggtgagatattgatattgagatcactcaaaaagaccttctcgaggtaacgatcttgcgtcattgagagcgcatcgctaccttgtgggacattgtaatcttgaaccaactgttctagtagtgtttcatcgagcgattcatccgtatacgtgagcacctggcaacaatcgcctaaacgtgcgagtgtttcgtattgctgtgaatcgccttcaatctgaatatcaagtactgcggctaatgatgaatcttgtgtctgttcggtgacaattgccgcaacgcggtagcccatttccttagcttttaaagccaacttgtacgcacgttgatcatttccaataattccaatcgtttgacccggataaataactggcatctttctacctactttcttatgcacatgacttcaattctcagatacttctattatagcgaattctatccctaactacctagtactttaactaaatcttgatatttttcgcacaaaaaaagggagtgtgccataagtcgggatatcccgaggattaacacagaatggtgaatgattgctgtaagcaatcgtttgacattcagggttaaccggaaggatatgacttatagaacacgtttagactattaaagtacggatatcaaaaaggaggctgagacaaattttacttttgtcccagcctctttttcaaattaattttcgttattttcgtctaagaagaccacttcgccttgttcaaaagcagcaatccgtgctaatgattcaacgtgaatgccgcgttgatctaataactcgcgacctttttggaatgttttttcgatgacaatgccgaccccttcaagttgggcgccagcttggtcgataatttctaataagccttcaaccgcttgaccatttgctaagaaatcatcaatcactaaaacacgatcgttttcgttcaagaatttcttagaaattgaaatatggttgttaaccttcttcgtatatgaataaacagttgcgctatacatattatcttggagtgttaaactcttgtgcttacgtgcaaaaacaacgggaacgtggaaagcaaggccagcaaagactgctggggcaatgcctgatgattcaaccgttaggattttagtaattggggcaccttcaaataatcgtttaaactcttcacccattgctgccatgagttctggatcaacttgatgatttaagaagttgtcaaccttcaatacatcttctcctaaaacctgaccatcttttttaatacgttcctctaataaccgcacacctagcactcccttgttttctgaaattgaattaaaaataggttaccacaaataaaagctagcgacaactttaattaagacttttcaagatttattatcataaacaagattatttacggtgtttatcaatcgaattggtccaatcgataggttttgacgagttcaatcaacttctccggataattaggatccgttgcgtacccatcttgtttgagcgcttgggctgcctgtgtataattggtggctgccacaacgtgttgataatgattatgatcccaagatgtcccgtgcgcaaagagtaagacgtgatctaacatagactcgcgatagtcacggtaaacccgaaagcgcgcggtagtcgtcacccattggccgttcaagtattccttagtggtcatttctttggtattatccgggtcgtcgcctttaatcccaaaatagttatggtaatccgctgcgagcgaactcttgccccaatcactttctaagatggcttgggccaatgtgatgctagagaggacgtggtatttttgttgtaattcttgcgcataaggcgctaattggttaataaattcttttttcttcttcactttagccaactcttcttgtttggcctcattggctaagcgttcctgggtctgtgcgccggtgtattgaatatataggactaacccaactcccagagcaaataaaacgcccaacaggacgactagccattctgtcggttgtctctttttagtgttgtaccattttttggtcgtgcgccgttttttcttcttcgccactaatctgcctctacttcgttcaatctactttatattgtacacaaaattacctcgaagaccaatgcttaatctgcttaattacctttaattcctattttgtttttttattgttataatatcgtttggaaccgattacgatagtaaaggactgatttatttgacaactcttaactggggcattatgggtctaggcaatattgccggtagttttgcaacttacttcaaccaaccggatggccaaatctatggtgctgcttctcgttcattagaaaaggcaaacgccttcacccaacaatatcatattcctcatgcttacggtagctacgctgagatgttggccgatcctgccattgatattatctacgtcgccacacctcacaactatcacttcgatgggattatggcgagtttaaacgctggtaaacatgtcttttgcgaaaaggccatcaccatgaaccgccgcgaattaaacgctgctaaagcactagcggccgaaaagcatttaatcctagctgaagccatgacaatttatcatatgccgctttttgcagaaattgaacgtcaacaagttgcccaagatttaggcgctttaaaatcaattcaaatcactttcggaagcttcaaagaacttgatccaaccaatcgctttttcaatcctgaattagccggtggtgcgatgttagatatcggtgtttacgccctcgcatttgcacggcggatgctgagtgctaaaccagaattgattgccgcacagtgggtgccatcagaatctggtgtcgatcaacaatcaacactcctccttaacaatgcccatcaagaaatggtgacggtcacgcttaaccttcacgcgaagatgcctaaacaaggcgtgctcgtttatgaaaaaggttatgtgacggtcgatgattatccacgaccagacaaggcccaactgaccttccctcatggcactacccaaactattcaagcgggtgatgctaccaacgccatgaactacgaattacacgacttccaagaagttgttcgcggtcatcgggaaaatgacacgctcgcactaacaagcgacgtcatggacattatgaccgacgctcgcgcacaatggggctttgtttacccattcgaacaaccttcagacttagaataaaaaagtgtgctatcaagcattaatgattaaaaaggactaggacaaataataattttgtcttagtcctttttatatttcctacttataacggttgactcaacaccaccatatcctgcaatcgaatcccattttcgataattggttgctgatactgttcaaagaagtttttacgaatatgatcgaaacgaaagccctgacgcagataaaagccgattgctgccaaactgccatccccagtgcctaccagtaatgtccggtatccttgggcaaccatcatctgtttcaaatcgttgagcgcttgttgcccataaccttgattccgataagctggcaataaggcgatatttttcaattcaacttgtgtttggtcaacaaacgtcacatgcataacgccaattacggttgattggccggctaagtgaatgctatagagctgaccctcgtttaaataacgacgaatcatgccgacttcttcatctgctaatcgtaaataaggtaagtaattctcccgctcatttggggcaatcatttgataagctaacatcctgccgcctttctttagccataaaaaaaggaccaactgattgacagttgatccacgactaatatttataaattagtttttgtttacgttaacggcttgtggtccacgatcgctttcttcgatatcgaaagaaacgctttgaccttcttcaagagtcttgtagccttcaccttggatagctgagaaatgtacgaatacatcactaccatcttcgcgagttacaaagccataacctttttctgcgttaaaccattttacagttccgttttccatgagaaaactcctccttgtgtcgttagacacatataaatttgtgtatttctgtcggtgcgatggaagaaagttcttttggaaacattcgaaccataacctgtcaaaaagtacaaacatagtgtaacatatgaaaaaaagagaaacaaccctaaacactaaaaaataaaccgttttctttctacgataatcgaacttttatactttccattaaattgacgtttttccgtcatccaccatggtaaacggttggcttttagactgatttacgctaagatgaagttaacgaatttaactactggagtgcctgacaatgctaaaaatactaaaacgattactccccattttgggactactatttctacttgctggttgcgaaaaaccgcttgatacgaaacaacaggtcaaagacgacctcaacactattttacagatttctaaaacgcaacaaacagcgcttagtaccctagagaatgctggtcaaggggtacctgatagttatcttaagattcaagaaaaataccctgatcaaaatcttttagaggttaagggctctaaaattgcgcaaactgccgcaacacgaaccgcagcttatgacacactcaaggcacaacaagctgaattaaagccagtcgttaagcgcttgattaaaattgctaatcaagaaagtgatgagttaccaattgaattcatcaaggatttaaatcagagcttgaagctgtctgcacttgattacacaacactttctaatttctacgacgctgccaccactgctgaaaccgacttttatgccgatcacacatcagctgatgcacacgcggacgatctagcggcacctatcaaccgattaaatcaatattatagtgccatctaccaacaagcagaaatcgctaaggttaatatcaatacggtcactgctcaagctaagaaagttcaaaaacaattagactaatcacttaaaaaagagtcgggacaaaaattacttttgtcccgactcttttttattcgcgtttaaaccttaacaatggtttagctacaaacggtgtcacaatcaccgctaaggctatttccatcaaagcgttaatcgccacagcactcaacattacgataattaagtgactgacgtccgttttataaataccggctgcttgttgactgtaaaaagcccatgtcaacagaatgactaacgtcgtattaacgatggtgccaaagaaagcggcgattgccatcgagccccgttgccccgctttagtattgtgtaagtgttgatataataatccggccactaaccccaccatcaaacgcggtaaaatagcgattaccgggttttggaagatcaataaggttaatgcatcgactggcgctgtataggcgtgaatcagggataacgtcccccagattgcgcctagagttgcgccgccacgagtacctaagataatcgccccaatgatgacggttaaatgcatcgtggtgacgccgggtaaccctggtagaatataaatataaccaaccatcggcacaaaactctgaatcattaacaatgccgttagaatcgctagaatgctggtcttatacgctgatgaattacgtgtcatctctacttacctctcccattaacttattgcccattatagcgatttacaaaattgaattcaattctcaaacttaattaggacacaaaaaaacgacaccgctaacggtatcgtttaacttgttatcatatgcgggtgagaagactcgaacttccaccgggaaaattcccgacaagatccttaatcttgcgcgtctgccattccgccacacccgcgatacttgctttatgactttaagccacgtacattagtataagagaaacccgaattgaagtcaacaaaaaatcgctctggaggccaaaaatgtttatcgaaaccgctaatttaaccgatatcggtgccttaacgacgctttatcaagctttaacaactgaaatgcacgcattccaaccgactaattatcaagaaaagagcagtcctgatttcttcacctggaaaatgatggttgaagacaaacgccaaactgtctatatcactcgcaatcaggatcagataacgggtttttgtcacgttaccacagcacaaactagtccttccaatctctttatcagccatcaatttgcctacgtcactgcattatacgtccatcctgactatcgtcgccaaggaattgcaacggcgttacttgcaaaagcccgtacttggcaaaaagaaaaacaactcgcctttttggagctaaccgtcttgggcaataaccaatccgccctgcaactctatcaaaaattaggctttgtgacacaaaaccaaacgctccgacaagtttaaaaaaacaggccctgggacaaaattatttttgtctcagggcctgtttttaatctctcaatacttatggcacacttctttttttaaatttcttttaccaattttaaatgaccatgacagcgacggcatacgtaacgtgccgtgttaatatgccgttgtcgttgatacaactgaccacatttggtgcattgatattctagtcgtttttgtgctgcctttttaggcgtgactggtggtgcaaaacgcgcaccaccaacctgttgtaaaagccgcttaaagtcttgatcacgatgccgataaccacggtgcaataaatgcaggtggtaatgacacagctcatgtttaataataccttctaaaacagcctgcccttggacaaccatcgacgggttaatatcgatgtggtggtcttgcagatgataccgaccccctgttgtttttaggcgccgattaaagtttgcctggtggctaaacggccgattaaacgtggttactgaaatattttggataagttgcgttaattcttgatccgtcatcattaatcagttgctttaggcgccttcatcgtcaattgaacccgttcacgttcttgatcgacgcttaagacccaaacctgaacaacatcaccgactgaaacttcatcagatggatgtttaacaaagtgattggccaattgcgaaatatgaactaagccatcatgtttaacaccgatatccacaaaagcaccgaaatcaatgacattccgcacggttccttctagggccatgttcggtttcaaatcggcgagggttaagacatcatgccgtagcagtggtgctgtcatttgatcccgcaaatcccgacctggtttttgtaaaccgcttaagatatcttcaagtgtttcagagccgaccgctaattcggtcgccaaatcagtcactgttaattgcttaattgctgctgataattctggtgttcctaaagcctccaaagtgacacccaacgattttaaaatcgccttggctactggatagctttcaggatgaatatccgtattgtctaatgggttgtcgccaccgatgattcgcaagaacccaacggcttgttcgaatgccttagggcctaagcgcggcactttcttcaattcactgcgtttttgatataagccgttttcgttacggtattggacaatattttgggcagtcgtcgctgataacccagaaatatgttgcaagagttgtgggctagcggtgttcaagttaacccctacgctattgacaacatcttcaatgactacgtctaattgcgtcgtcaattccttttgggcaacatcgtgttggtattgcccgacaccgactgcttgtggatcaatcttaatcaattctgctaagggatcttgtaagcgccgtgcgatactaatcgcactccgctcttcaacatgtagatctgggaattcagcccgcgctgtatcacttgctgaataaacggaagcccctgcttcgttgacaatcacgtaaaagatttcccgggaaatggtttttaaaactgatgccacaaattcttcagattcacgactagcagtcccattcccgattgcaatcatttcaacattatatttttcaaggaattgcttgaattcatcggcagctgctgctcgtttaggcgctgcagctggtttatgcggatagattactaatttatctagaaatttcccagtcccatcgacaacggctaatttacagcctgttcggtaagcggggtcaaagcctaaaacaactttgcctttcaaaggcggttgtaataaaagatgctttaaattatcgccaaagacggcaatcgcttgttgatcagccttttcttttaactgcttccgcaattcacgttcaatggccgggccaatgaaccgtttataggcatcttcaatagctgtcttaataatttgggcggcagctgagtcttgaccgtgaataacggcttgagcaatatgtccaacgatcatattttcggcaacttctagcttcaccttcaagataccttcgtgttcgccacgattaatcgctaaatattgatgttccgcaatcttattaatcggtgctgagaaatcataatagatttgataaacttgcttatcatcgctgtcggcatctttcacctgactcacaagttgcccgttttgacgggtgtattgtcgtgtccagtcacggaaagtagctgtttcactaatattttcagcgataatttcatgtacacccgctaaaacagcatctgtatcggtaatcttttggtctgggttaagataatcggccgctttttccaggaggacttgttctgaaaagttcggtaattgcgcaatcaggttggcaaacggttctaacccagcttctttagcaatcgtcgcctttgtccgccgtttttgcttatacggcaggtataaatcctcaagcacttgtaattggctagcggcttcgatttgcttttgtaaaaccggcgttaacttagcttgttcggcaatattcttgataatatcggtcttccgtttttcaagcgttgttaagtattggaaggtgtgttcgatttcgcgaatttgaacttcgtctaaactaccagtccgttcctttcgataccgcgccacaaatggtacggtgttaccttcgtctaataaggttaacacggcattaatttgttgtggtcgatattgcgtcagttgtttggtgacaagttgttgaatatcagtcatgtgcgtccctacctttatcttcaataaaaaaacagcacccgtcttgggaactgtcatgagttgatctaagcaatttttgagatgttttggatatacttagaaattcgttctgttgctttgtcttggttcatttctgaagcagcaaaagcttgcatatcaactgtttgatcatcatgcatgcttgtaattaaatcttcgcaaccttgaacgaaatcagtataagcaccgattaaacgttggttgttacccattaaacgagctggggcaacggctgtcttaaattgtgctaagaattcgtggtattgatccacaccgtctctgaagatttgggctgtcttttggtaatcttgttcgctcatttcagctaacttaccatcagcaacggccgctttcaaagggacgaaatatttgctcatgccttcttgcactttttcagtgtcgtcgattaaatcgttaacagcttggccgtatttagccaacttttgttgtgttttattcatgttaatcctcctagtttcctatgcttcagtatactaattctggtatcggcttgcaagagtgcgtttgaaacgcatttgacttcgagcattagcatcgtgttgtgaataaccgatataatcggttatttgcaatacgtcgctaagcacagaaggcagtttcaaaaagcacgtttcaatcgggtaacaattaaataaggcaccaaggacaaaaataacttttgtcgttagtaccttattcgttctatttctttttaagcatcaaactcgtccatgattgaccaagcatcagtttgatcagtaaatcaacacaaacgaaagtaacaagataaatcaagaaacttaacggccagttgtgctgagcttgaactaagtgttcgaaaataccaaagattactaacgttattagaaactgtaagaaaatccgcatagttaatccccctctactagtattcactagtaagtaaaattatcaaaagacatctcaacactaaccaatttagcgcctttattatatattttaagaaaccgttttacaacctgtattcgtcattatttagcagctcttctttggaagaacttcacgatttcaacgatgactactagcataaatgaagctgctagtacaatcccccattgatataaatcaaggtgtgagacatggaataagccattgagccctggaatcatgattgttgcggctaataagataaatgaagctaaaacagcccagttgaaggctttattcttaaagaagccaactgtaaagattgattgatggactgatttaacgttgaatgcgtggaagagttggatcatccctaacgttgcatacgccattgttaaagcatccgcatgagctaagccacttgcttgatgcactgggaacgtaatcgctaacgcataaacggctaaggtaatcccaccttctaataggccttggtagataatcgcttggaacacgccacctgagaagaagtttgatttacgcccacgtggtttttgattcataatccctggttcagttggttcaacccccaaggcaatcgctgggaaagtatccgttactaaattaatccacaagatatgcactggttgcagaatttgccaacctaaaaccgtcatcatgaataaagttaacacttcacccaagttggctgataaaagatattgaatcgatttttggatattagcaaagactttccggccttctttaaccgcaatcacaattgttgagaagttatcatcggctaagaccatatcactggcccctttagaaacttcagtcccggtgatccccatcccaataccgatatcggctgatttgagggctggtgcatcattgacaccatcaccagtcatcgcaacaaccttaccgtgtttttgccaagctttcacaattcgtactttatgttcaggcgcaacccgcgcataaacggcgtattgagtaacttttttagcgaattcttgatcatccatttggtctaactcagcgccagtaataacggcggcatccgcatcttcttctggggtaataatccctaaacgaagcgcgattgcttcggctgtatcgcggtgatccccagtaatcattagggtccggataccagctgaatgcgcatctgttacagcttgttttgcttctggtcgctcaggatcaatcatcccaactaagccagcgaaaattaaatcagtttcaatcgttggatcaaccgttgctggcacacttggtaagactttataagccaacgctaagacccgcaaggcttgttttgccaaaccatggttcgtgtctaataataattggcgctctgcatcgtccatcggttgaacaacgccttgtgcgtcgatataatgcgtaacgcgtttgagcaattcatccggtgcgcctttcgtggtcattaagaattgaccatcagcttgttgatgaattgtggtcatcaacttccgctctgaatcaaatggtacttcagcgacccgtggttcggctgctaaggctgcgttaatatcaaaatctttatcgcgcccatacgcgattagcgctgtttcggtcggatcaccaatcatgtccccatcagccttaattttagtatcattggctaaattcatgatttttaatgttaaattatccgctggtaatgttgcgccagcatcttgtaattggttgttagtaaatattttttcgacggtcatttggttcatcgtcaacgtcccagttttatcagacgcaataatatccgtactccctagtgtttctactgcaggtaacttacgaacaatagcctttcttttaaccatcttctgcgtccctaaagcaaggataatcgtcacaattgcaggtaggccttccggaatcgctgcgaccgctaacgaaatagcagttaataacatgttaattggtgattgtgcgtggcgtaagtaacccaccacaaaaacaattgcagcaataatcaagatcataatcgtcaaactcttacctaattggctcaagttcatctgtaatggcgtcgttgtttcgtcggcttggttgagcatcccagcaattttaccaacttcggtctgcatcccagtccccgttacaaccccaacgccacgaccgtaagtaacattactattcataaacgccatattggtccgatcaccaatcccactttctggatcagtcaaggtatcaacggtcttatcaactgggacggattccccagttaaagcggactcttcgattttcaaagcagctgattcaagtaagcgaagatccgcgggcacaatatcgccggcttccagcaacacgatatcgccaactacgagttcttcactcttaatcgtcacgatttcgccatctcgacgaacgtgtgcatcaggtgtcgccatttcttttaaagcgttaattgcttgttccgcctttgcttcttggaaaaccccaaaaatcgcatttaagatcacaacggctagaataatgaatgcgtctggccattcatgtgctaaaaagcccgcgatcattgctgcgactaataacacaataatcataaaatctttgaactgttctaagaaacgaatcgctaaacttttgcgtttcttttcagttaattgattccgaccattttctgccaaacgtttttcaacctgttcttgggttaaaccttgtggcgttgttgcgagcgctttaagtgttgcgtctgttgattgtgtaaagaatgtggtttgtttatcgaccattaccttgcctcctataaatttgattttgggggtaaaaaagagacctacaggaattctaaaaatccctataagtctcactaattaagataacaccagaatattgccttgttggtggcgttatcgcagacaaactgccagttactcccttatcgttaacctcattataaggtatagacaatctaaaaggcaagtaaatagttattttaataactagattggtttacgagactaggctcgaaggctaaacgtgcttttgtcagtagctttctgtgctttgctaaacttatcaaaccggtgatttcatcaccaattcgctaagttctgcaaatgctcaaaagctaaccactgacaacgcactctgttttattgccagaacgtatcatagattgttattggtaaatgacgcttgtgggccgtttttttgtaccagttttcaatcttcgttgcggcttcttcactgacctgacgaccttctaaatagtcgtcaatttgatcatatgtgacgcccaatgctaattcatctggtaatgctggacggtcttcttcaagatccgctgttggtactttttcatagaggtgtttaggcgcaccgagttcggctaacatggccttgccttgacgcttattgagtctgaagattggcactaaatctgcgccgccatcaccaaacttcgtataaaaacccgtgatggattcggcagaatgatccgttcccaaaacagcaccactattttcaccagcgatgccatattgggcaatcatccgcacgcgggctttaatattgcccttattgaagtcactaacaattacaccagtttccgcaagggattgaaccatcgcgtccactgagcccttaatattgacccgtttgacttgatcagctgccataaattcgattgcggccatcgcatccgattcatcagcttgttccccataaggtaaccgcactgcgataaattggtaactttcatcgccagtttcagcccgcatctcttgcatggctttttcagccaatgcgcccactaaagttgaatcttggccgcccgaaatacctaagacataggtttttaagaatgtatttttctttagataagccttcataaaatcaaccgagcggcggatttctttagcagggtcaatcgttggttgggtttttaaggctgcaataatttctgcttgtaaagcgttcatttgccagatactcctttaaaaataatcgattctaatgcattaaattaacatcttctctgactttgcgaattgaattcatcttattatcccaagtccgttgtgataaatcgactgggtaatcttgtggattcaagtcccgtttgtattcatcccacagtgaatcaagattttcagcacagaacttcttaatcgctgctagttcgggtaacgtatagacccgtttaccattttcaaaaatggttcgtaagattggccgggcattgaagtcagtcaccgtcttattgatatacgtgtaattaggatggaacatgtaaatcgtatcttgttcaagtggatcttcatcccataatgtgatgtagtccccttctgatttaccgtcaacttgtttggtaattcgccaaacttgcttgcggcctggtgttgaaactttttcggcattacttgataatttaatcgtatcgaccatcttgccatctgaattctcaattgaaacgagtttataaaccgcgcccaaagctggttggtcgtaagcggtaattaacttcgtcccaacgccccaaacatcgattttagcttcttgcatcttcaagttttggattgtcttttcatctaaatcgttagaagcgtagattttagcatccgtgaagcccgcttcatccaattgttggcgcacacgcttagatatataggccatatcgccactatcaatccgcacgccttggaaattaatccggctaccgaattcgcgcgcaacccgaatcgcacttggcacaccactcttcaaagtatcataagtatccacaaggaagacacagtcccgatgcgtttcagcataggcccggaaggcttcgtaatcgttacggtaagcttgaactaaagaatgcgcatgtgttccgcttgctggaatcccgaaaattttagaagctcgtacattactggttgcatcaaagccaccaatataagcagcgcgtgtgccccataaagcagcgtccatttcttgggcccggcgtgtcccgaattctaagacgggatccttgccgaccactgatttgatccgtgctgctttagtcgcaatcaatgtttgataattgacaatgtttaatagcgctgtttcaatcaattgacattgggcgagcggcccttccacttgcataatcggttcgttgccaaagaccaattcgccttcaactgctgagcgaatcgttaaatcaaaatctaattctgctagatacgtcaaaaaatcttcaggataaccgacttcatcccgtaaataagctaaatcgctctcggtaaagcggagattctcaagataattaacgatatgttctaagccagcaaaaatagcatacccattttcaaaaggtaattttctgaaatagcattcgaaaaccgctgtccgattatggagtccctttttaaaataagttaacatcatattgagctgatacaagtctgtatgtaacaacaaactatcatcaggatataatttttgcatgtcgcactcctaattagagatatatttggtatacttagttgaagctattatacaataaaacagcgagttctgcataatttcgagaaggagttttacaaatgcaatttccgacagtctcagttttaaatattccttttattaatactactaaccaagcatttattgcgcaactttcaaaagacttagccgctaacgaaaaccgttttatcgttactgctaatccagaaattgccctctatgccactaaacataacgattacttccaaacgattagccaagccgattacattacaccagacggtattggtattcttaaaggcgccacaatgttaggcacgccgcttacagaacgaattaccggttttgatacgatgacggccttattcgaaattgccaatcaaaacagctatagcgtttatttgcttggtgctaaggaagaagttttacaagccgcttgccaaaacgttgcaaaacaatatcctaacgtcaccatcgtcggccaacacaacggttattttgacgaccaagaagaacaaaaaattgttgccgatatcgaacgaacacaacccaatattattttggcagcacttggcttccccaaacaagaaacctttatcgaagccaatcgtcacaaagttaacgccatttggatgggtgttggcggtagctttgatgttttatcgggaactgttagccgggctccaaaaatttggcaaaaaatgcacttagaatggttctatcgttttgcatcacatccaagtcgcttgaaccgtttcccagcgcttattgaatacatgcgcttggttaaaaaagaaaagaaaaactaaaaaaagcattgaagacaaacttaattttgccttcaatgcttttttattttgataatcgttttaatgttcggctgtactgaattttttctaaatagtaccgtctcacattaccgtcactcagcaagatgcccagaaactggagtcccttaccaattgatttcgtttttttaacagtgctcaataaattaatattagcgttaaagcggtctttttgatgttgatcgtaaaaccctttttcagttaggtaagcttccagtttcgctttgattgcttcatcactcgctgttaatctaaacacagtcgtctgacgtaaaaagccagaaattagaaaggtttttaacatgtcactttgagtcatactgttttgtctaatccgataacgcatcaacggttcattagtcacacctatttgctgacccgccgcgatcattcgtaaccacaaatcataatcttcacaggcgattagttgttcctgatagccaccaactgtttcaaaagctgcttttttacccagaacactcggatgaacaatgaaattatcatattgtaataactcacgaacggcagctgctgattcaaccatttgtggatgccgaccaatctcggcattagtttcatcaatcagaatcgaagatgatgcaataacatccaattgccgttgttgcaataaatcaaattcagtcattagccgttctggcacagcaatatcatcagcatccattcgcgcaatgtaatcaccccgacttgctttcaatccccgattcaaactaggtgctaaccctagattatgctcgttgctgattaaaacaattcgcggttcttcttttgcatattcatttaaaacagctgccaatgcttgattatcaggattatccaaaacaatgatgaactcaaaattttgataagactgtttcagaattgattcaattgactggcgtaattccgtttctttttcattataaacggccatcacaatactaattaacggtgtttccatagtaatctccttgttgacgcctacaattgtgcatacaaatcatgcatcaaaatcgctaactggcgtgttgaaaatgattgactaacatgcttattaaaggctaagcccatgccaactaattggttattttgataagcagcgtaagcttcatttaacgctttgacatatccttgtaagtctaagctatccacaacccagccatattctgggctatccataattaccttgctatcaccaacatcggtcgtaatcgcagggacgccataattgccagattctaacaagacggttgggaacccttcgtgaattgacgataaaactgataaatcggcgtgtcgataaaagtgcgccacatctgattgaaagccatcaaaatgaaccttatcagttatttgataatctgttgctaacttcttaaactctgcttctagttcgccatcgccaatcaggtgtagttgatattcaaaatcaacatttgctaacgcttctaacaatagctgttggtgtttttgcgctgttagtctagccacacaaatcatcgtgaattgcggttgcttaactggtgtcggtacttccggactaaattcaatggcattaaaaatagttgtcatcttattcgtatcgatgccttgttgtaccaagctgtttctaaaccgttcggcaatcagatagatatgatccgcttttttaagtacccagagacttaacggcaataaaattttacctttaaaccctttattcagataatcaatcttaggtaacgtgtgcaatgtcaacgtccacttcgccgtaattcgtttccgaattaacgctaagaagagattagaccgtggtccatgcgtatgcacgacatcgatgttttcagaattgatatgcgctgctagttgtttcaagaaatgcggggttaacgtttttggttgttcaaacacttcaaccggtaactgattagcgcgcgctagttctgcaaccgggccatcttcaaaaactaataaagacggctcgtctttaccaagtgcgatcattgccttcattaaaccgataatatgtgagcgaccaccgcccgtttcattccctgcgtttacaaaaagaaccttcacgtaatcaccttttcattctaatttagttttctaaatcttgcttaatttgtgtcgttgaaatacctgttgtccggggaagatagatgacttcacaataatcctttaagaaatcaaactttcctttccaatcatcacccattacgaaaacatcaatatcgtatttttgaacgtctttaattttttgttcccaatctttttcaggaattaccttatcaacatatcgaatggcttcgagaatatatttgcgatgttcatatgaatggtaagcttctttatgcttttcagcattaaattcgtccgttgataagccgacaattaattcatcgcctaattggctggcacgttctaagagatgaacatgaccccagtgtaataaatcaaaggtcccgtaagttaaaacttttgtcattttaaatcatcctttcttaaggcgcatcagatcttgccggacacgtgtatttaatccaattaatagtatcacgaataaaagaccaacgataatcgtctgaacgacgagatcgaagaataaactaccgaggttaattggtatgtgtaagccaattaatagcgttaagccaaatattagccagtacttccaatgttcatgccaaaggaatttaaaatctaagtgccctcgtactaaccaaatccgcatcccacaaaccaataattcggtcaggacaatgatggttgtcccaccattagccccaaagcgaccggcgaatacgaaattcccaattaaggagaagaccgcgccaactaggtatggaatcccgacaattctgtacatcccttttgatagcgcaaattgattggcataaataccaccataaggaatgatcaccacaagtaaactaacccagaagaagttatccgtcatcgcttgatagcgactaccgaaaaaccaaacgataaatttattagcgttgaccatcagcgcacttgtaaatagcaagccaagtatcaaagtatagtccaacgaaactttcaataaattctgaatttgattttcatccgcttcttcactgtccatcttagccataatcggcattaagacgattgtcaccgaacctaataattgcacaaccgcccgcgccatggtttgcgtctgagcataatacgttaattgaactgaacccgctaataagccaataatggtttggtcaaagctcgtataaaattgcgcagcgaccgacggaatagtcatggtaattgattctttcaaatattgcttagaaaaatgaatccgtccaaacttgaattgaggaatttctgttttaatccctaaccagaagacaaagttagctaggtaagtaatactattgattaatagatagatccaaagatcttgttcactgtgtacgaaaataaaaatcgtagcgactagtgtcaatttaataattgtatttcgcatgaccactgttttaacttggccacggccaatataaaaccaagaaatatctaagacatacccaattaaaaatggaatctcaattagaaaatagaatttataactcatgaataagcagacaaccacgatgtaactaatgatcacgattaaaccactaagaagttgtaaaccccataattttttgaaattttcttcaagattttcttttgtcgattgggcaattactctgacaccaacctggttcattcccatgagaatgataaaactcaagaagactggaatcgagttaacgtaggaattaatccctaacgcttctttgcctaatacccgcgccacgtacggtgtcgtgacaaaaggcagtacaatgatcagcaactgataaacagcattataaatgatatttgttgaggcttttttcatactagactttccaaacttcctgaattattttttgcgtcgccgaaccatcggtattcgcattgtgtaactgattaaacgcttttgtcgtttgcgctgttagcccttgactaagcaatgtatacaacgcttgattgtccgttactaatggccctgggataaaggcttggtagtcaaaataaaagcctcgtagaatatcctggtatttatccaaatcatacgcgtaaaaaacaatcggcttttccaataacgcataatcaaagaaaacagatgaataatcagtcattaaaacatcggcggctagatacaactcttcgatacttgcgtagcgattgacgttatgcacatgtggataagctgcaatgtctggcatttgatctgccacgtttggatgcaagcgaattaacaagtcatattgatcgcctaattgtgcttcaaattgttccaaatctaacgctaatttaaacgtgggttcatcgtctctaaaagttggtgcatataaaattgttttgcgtgttgcatctaattgcagtttcgcttttaaactagctatcaattcatggtcatctttatgctttgctaaataatcattccgtggtaacccgtagctcataatcttggtttgttttaaattaaatgcccgttcatataaccaattatcttcaggtgcattagacacaaagtagtcccagttaaggggttctcttgccgtcaaacgtttgaagtcattatcatctggtaaatcattgccaatatgtttaagtggcgtcccatgccaagtttgcacaaaaaccccatttttatagggttttagacggaatggaaagttaatatccataatccaatatttagcacgcgcaagcgcctttaaataggccttctcgtgtcttgccacgaactgaatgttgatatccggatattgggctttaactgtttgtcgcgcttgttcatcgtttaaaacaataatgtagtcactattaggaaacttttcaatcaagccttcaaagagtgctcttggattaccagaaaatgatttcccaaaaaaagaattgataaaaaatgtctcgtctgacatcggagtgactaatttaatcaaaccaaaccaaacgcggtggtataaaactgctttaactgttgcgatagccgtcatgctttttaagtcctctcgttgtgactaatgcatagcctagtgcaaaggccaaaataattgtatctgccaaaaagtccattacattaccactaaatgctgataaggcaataatcaaacccgatccaaataacaaactcacttcaaagaacgttgcttttttgcctagcacacgaattacttcgtataagcaatatagcagtacaaaaacgtaaggcatgattaataataagacgccgatgaagcccattgaataccattgtgaaatgaagtcttgctccaagttggcaatatggttcatccgagtataagaaatcccgaaccaattatttaatgaatcattattaacggatttagcgcggtttaacattgcttcttcaaccttacggtaatttaagcgatcaccaactggccatttcattacttgataccagaattgtggatcatcacgatatgaatacccgcccatcacaaatctagcatttaatgaataatcacgataatgatttttaatatatctcatcaaaggtgtttctttacgatgatcaatttgatcatccttatgttctttctctttttctttttcagcttctaattcttttttcttttctttttgttctttcttagtaccatcttgtgtcttttgaacagccgtatcggttgttgttcggttaaacattggtgacattggtaaaatagcaccaccaaccaacgttaaaactgcaaatgttgcaaataagctaactttgaacttaaattctttaaacaacaaactgtaaattaaatataagatgatataaccagctaatacaacgaagaaccctaatgaagcagttttcgtaccaagcatcagcatcgcaaacatttgaacagtcgctagtgcaatactctttaaatctagcttttcaaccaaataataaagaaccatcggtgtcaataatacttcgacagctgaaactgcgttggcataatagaaaaagccttttgatgctaagccatagtatgcccattgctggccgccgccaaaccatgaaaaaatattaccttgaatccagccaccaccatatgatgataagctaattttgaataagttcgtaatcacaatgctaccagaaataatccacgctaaaaacttaatcactttattaaactcagctctagtcaccttaatctgcgttgtgacaaacaagacaaccaacggaattaccattctaatccagtagaagatctcccctactgttgagtaacccaagtcgattgggccagttgatttaaaatgtctcgtaaagatcagatgtagcactagataaataactagaatagccatataaagccaagcaaatcgatttgctttattatgacgactactccaaatataaagtcccgcaataatcgctacgagaaaaattctaatcagcgttgctggtgaaaatggcacccaatttgtgactggtggcacatataaaaagtagatatccaaaaacggttgtagcaacactaataaaattagtgatttttttgtatattctttaaagttcacggacttattcctccaagattaatgattcaatatatattgatagaacgtatcggctttttcctgattttcttttgaaaacttgttcgttaatttatgcatacttgataatgctgttatttcttgataacgttgctcatcaaattgttcgaacaacacttttcccataaggtgcggttcaacgttacccaaccgtggtaactttgcgtattcggcagttaggtgatcacaagcaatcgttaaaaagacatggaacataaaataattatctagcgtatcgtgcgtctgccaataattatataataaatctcgcgttaatactaagatagggtggttagtatcactatgaatgaaccaactcgaagcagcaattgcccgattttgttgttgtgtattgctgtagaaaaagagtggtgcatcaaaaacataacccgggaaattagtccccgtaaaatagactgtactatcaatccaagtgccaccatgtcttgttagtagggccacccgtactaaatcggatagatgcgcgtaaggaatcaatcctgcatcaattttatcttgcaagaatgttggaaaagttataaagtcactcaaatttgctaatgttatgatttgcacctattgtttgggatatagtctcttaatcgtttcgatattgtgtctgactaatggtggtgcatcttcaatcccttggaaccaacaaattcaaatcacgttatttttttcgccgcttgtcgtttgtacttgatattgatcaagaaacgctgtggcttcttttttaacttaacatacgtcaaggcatctgcaaccggcgtttgcttattctttaagtagaaattaataaagcttggagaaagtaatgtcgtcacataattcaatctcttttttagattcattttatcccgcctatttattttgactatcaacttttaaaacttgagaaaacatttctgcgttactattcgtattcttttcaattaaacgccatttagcatatgggaccaacttgccccctatggttttaatcttataataccctctgtaactactatcagtagcctgtggatgaactgcccaataatattgattatacggtacttctagatataaacgataatctttaggcgtgttatgtttttcctgataggttataaaatcatttttgatacgactcgcatgaccaattcgtgttgctaagcccgcataaaagataacaaccattaccatcattattctggtaattggtaagctaaatttaacagcattcaattcgttgcataaggcaactactagcaaacacaaacagaaataacttgcaaacgctcctcgaggaccaaacggtgtaactacaaagaatggcacaattaaaacaatagcagctgcaattaatgcaatatattcaatattgtgggtttccagtgataacttagccatttcaattacaattactaataagaataaaattgataataaacatgatactaaatagcgatggccgaagtcctttaaaaaggtattaaacaaaatataatgatattctatgaaagcaatcaggatactcaattctagataagaaaccacagtccccaacttattacccgaacgcttttggagatttttaataattaagtaacccagaatgacagcaagtaacactgtaataattggattatcaatcaagagataaaaatccatttgttgtgaaataatatgataaaccttagtcaatgaaaaacttgtttcccggtaactgtcatgatgtaataatatatttaaataagctttattggaaaacattaaaatgccaccaatatatgtgccaatgaaattagcaattactaagtagtttttctttttttggtatagcatatagcccattaaaattgtggcaactgctaaatttaatagtgtaacgtgttcaacaaaaaagcaactgattattgaaagaaccgctattaaaatactataacgtaaatactttgatgcttgccaatcagaatagtgatacttcactaagttaataataattaagggatataccaatgaagccatatagttaaagaagccggcattccaccctaaaacttgcgcaaagaactctgtactcatcgttaacatcaaaataagaattaataacgtatttctttctaattgcctaacgttgttaatcaaatgggcagccagatagacaactagtgttgtaatacctgcgtaacttaaaaccttaaataccgcactatgactagcaatgataattaaactattaccagcgtaacgtccatcataatttaagaactgacctgatccaaaataattttttaaagtcgttatcccccagtttaaatcatctccagtcaacggaaagttaattgatagataaccaaagaaaataaaaaccagaaaaaagaaaccatatttttttattgcctcattgttacgaactgtcattttaaagcgtcctttcgagtaataaacatagataataaagtcgtcttagaatcctaccttattactatatcctcttttaaagtctttttatcatttgcttgccttgagtggatcttttcatagacagtgacccaacctacggcagctaacataataaatgccgggacaatgaaaaatcgatatctagactgaatctcaattaataaatggaccataaaataaccgatgatcatcaattttaataaataaccgtccgtccatgtttcacgccatttgaatactgctaataaggcatttgctacaataaaaatatagaacaaaaactgaaccgcattcaaccaatttttaatctttaaagataacttaacattatctgccatcccccacattagggcatcatcccgagcagtccacatcttcttacttttattgaacattaaattaacgagcttaggtttatcttggattctttccttaataatctctttgcccatcttatctcgttttgcgccaagtggataccgattcattaagcttaagtccgttgcagagtagctcccaacggtttcatcattcaaccctaatacaaatttccaagttggatttctattttccagcggatattcggataaatgcgttacttgcaaagcgctattcactaagaacaacatgagaaaataggccaaaacactagtggtaactcttccgagtgattttaaaatatttttccgatccggtgccaataaccattttgtaatttcaaaacagacaagtgcaataatcaacaaaatgcccaatggtcgcatcatattcccgagtgctaataaaacaccagcagttgctttaacccataattgatcatgctttaagtatagatagattgctaaataaattaaaaaagttgctagaaattgattcgttaaaacacctgtcatataaatatacgctggataaaatagcaataacgtatacacaatgcgccctgttatttctttaaagtgtaggttaataatcttatacccaacaaatgcaattccgcaatttagaaggatgttaatcatctgtagaataagcacattttgaccaaatattttgatgatcaatgcttgaaaataaacaaagcctaactgataaggccaactttgaaagtaactttcctttagaaatgagaggtcaccttgcgtcgctagtatcgcggcatgatgcatcatttgaaaatcagaactcggtgctgtcgggaccttaatcaaccaaccaattctgactaatgtcgccattcccgttacaatcataaagaatatttttttactggttatcttggtcaataaaaccaatgccaagataattaatatgtaaaaggcaatagcaacaatcattaatttagaattagataggtaattaccggtgactaaattactgattgagtaatacgtaataaaagcaaaaatgcttaccaaaagtactgtataagcaccttttacaaagccgttcataaatttttgcatcaaagatacctcctaaacataatatttttaattttatcacatattagttcaataatattaaatatcccgttattcttagtattttcacttagattgtcttttaaagaattaacttcaatttcgatattaaaaaagcttcaagaagagatggatgtaagctgattcctgggacaacttttaagagagggtataatgaataaatcatctctcaaaaggaaggaatttttacatgccaactcgttacgacaaagaattcaaacaaaacattatcaacctatataagcaaggcgaatcagctgcccaactggccagagaatatggcattggctattcaacagtccataagtggatccagggccaggccaaaactcaatccggtaaatcgccagacgaaatcaaagcgatggaaaagcgactggcttcgctgtctgaggagaacgaaatcctaaaaaaagccctgggcttccttgcgcagaagtaaccaatatctttgattacattcaccaagaaagccatcaccaccaagtaaccaagatgtgccgaatcctcggtgtttccagagctcagtattatcgttatcgatcccccaaaccttcaaaacgccgggccgaagatgcgggcttgaaacaacggattctgcggatctttgcggaatttaagcagcgatacggtgttatgaagatccaccatgaattgaatctggaacttcaaccactgcagcttcggtgcagtccacgacggatttcccggctcatgaaggaactggatatccactccgttaccgtcaataagtggaaagcggcttcggcttccaaaaccaaggttgaacagcgtcccaacttgcttaagcaggatttctcgaccactggtttaaatcaaaaatggaccgctgatatgacctatattcaaacgaagcgtaatggctggtgttacttatcaaccatcatagacctgcactcacgacggattatcggctattcgttctcaaaaaagatggatactgatttagtcttaaagacccttgaaagcgcggttaaaaatcgaaccattactggggacctgattatccatacggatttaggatcacagtataccagcgatgattacaatcaacgtttaactgagctacatatccgccactcatacagccgtaagggttgtccgtatgataatgcgccaatggaatcctttcacgcttccctcaaaaaggaatgtgtttatccagtgccggtctttgaagattatgaaactgctgctgccgtcctttttgaatatgtgcatgctttctacaataggaagagaattcatagttcactgggctaccagacccccttacaagttgaaattgcaacacttacgagccaaatggccgcctgatttaatgctttccagggttcaaataagttattaattgcgattaacgatttatttgagctgtggaaggtaaacggggttctgaatgtcccttaaaatctgtctcaaatattgacttcaatccattattcatccattttaaaacattcatcttaaatgagccatcaaatgttttttcgggtgataggacatccagtccttttgggccaaaggccttataacgttgaacccacgagacaactagtgagttactcttaataccatattttctcgctattaatttataacctaagggtgacgttagataatcctgaacaacttttatttttaatgttaggtacttgtaagcgctgaactgtgttatactagcggcgtagctattgatcattgttcaggtaatacaaggaggttttgctgatgaccacacactatgcagcacaaattgtaccattgaatgcggataagattggaacggctgcttatggcgaagcgacgttcgcaattgcagatgatgaattaacgattaagatcacaatgcacaacacgccggccaatatgcagcattgggaacattttcatggctttccggatggtaagcaggcgttgatcgcaacggctgcacaggatgcgaatgcagatggttttgttgatctcatggagactgaagccgtttcggggacgacgatggtaccttttgacgatgccccagaacatatggatattccccatgaccgctatccaactgcggatgagcacggtgattttacttatgagaagaaagtcccattaagtgagctacaagctaactttaaaaaagcatttggtgagtcggaattacaccttgaaaaacgcgtgatctatattcacggcgtgactgctaacgcgcacttgccagaaagtgttgccggaatggtcggccactatgatgcacacgttacgttaccgatcgcgactggtcagatcgttgcggttgattaataagcctaaaaaataaggaagttggcccgattggtcaacttccttattttttatcagctattgatcggcaacttttttcaataatcgtttcatctccgtgatctcttcacgttgcgttttagcgatcttctgtgcgagggctttgacttccggatccctgagttgcgcgcgttcactggttagaatcgcggtcgagtgatgggggatcatttcttgcatccaagctgcatcgtgcacggtcgcttggctacgaactagataaagcgagccagcaaatatcaccgcactaccaagtaggatcaggcggttcaaacgtttattctggtacattgaccacatgaataacagcattacaatggccatggtggcgcccataattagcgccatatacagtcgcgtttggcttagaaaaatatgatctaattggaacacattaaggtacattaacccatacataataactgtagagacaagaatcatcagtaaaaatttcgtgtattgtttcatgacgtcctcctcgctttcgctggctttattttgactataacaaaaaaaattgggtagcgtcaagaatcttgtgtaaatgaaatgccttcgtacatataatatgtatctaacttaaataaatgatgcttccaaggtgtcctggagtcctttgaaccctcgttggatccgcttcagagacttctcgttataaacattaaactgagaaaccaggaagcgatccagtgaatcttccgttggaaattgttctttgtgatgggtggtgcgcttgagatgcttattaaagttctcaatcaggttagtggagtatagtgattgccggatagctggtggaaagtccatgaaagtgagtaaattcggcattttaagcagatctttgattaatttgggataggtctgatgccagttgttggcgaacacattcagtttcagttcggctgcttcacggttggcggcccgatgaacttgtttaaagtcactgatcacggccttgcggtcttttacgcgaactttgttcatcagattccgcccaacatgaaccaggcaacgttgtcgtttggctttagggaaatgccgattcaagccttcatccaaaccaactaacccatcggccacaaacaacagcacatctttaacgccctgcttgatcaaggttcccagcagttcagtccagattccagtcgattccgttggcgccacttggtagttcagcacttctttcgtaccatctggacgaatgccaatcgcaatatgaacggcttctttttgaacggtatcccgctttaacggcaagtaagtggcatctaagaagatggccgcatattgtgaagccagtcgacgttgctggaaagcttgaacctgttcattgacggctttagtcatgttggaaaccgtggctttggagtagtgagcaccgtacattttctcaatgagttcggcaatttcagcagtggtaattcccttggtatacaactgaatgaccgttgtttctaaattatggatctggtgcaaacagtgtgagagatgaccatctaaccagctattgatcctatgttgaaggttatgcagctaacaatgcttctaattcgtccacgactgagaacccgatgagacttaactctcgtcgggttcttttgcgtattgcgtgaacaatttccacaccgctcaacgttgcactagcggttcgaatgctttgaaagcttgctgagcggacacgatgacgtttaatgaatcggtggtcctgttcaatcaaattatttcgatatttggaacattggtgggctgatttgctcaaatagtcttgctttatcaggtgcttcactgctttcagtgttgcccgatattgatcagtgactaatcgatcaggccgaccattggtcgtcaagagacgcttcaaaaagtgataggatgcggtataatcgcggtgttttcgtagctcaaaatccatggtcaaaccgttactgtcaatagcgcgatacaaataggcccaacggcctttaactcgaatataggtctcatcgattcgccaacttttagcgtgagctgtttgatgccgacgccatagagccttaaagatggggccatagtgatgaacccaacgcatgaccgtggtgtgatgaacagtgataccccgatcccgaagcaattcaacgatgtcacgatagctgagactgaatctgaaatagtagccaacggctactaagatgatgtccttttaaaagtggcgtcccttaaagtgattcatgcgcgcaatccctcgtttcttggcacccagtatactaaaatcaagtcagcgaggaaaatttgcaccagaaccgattaaacagcttttaggcgatcaaagtattgctaaagtgcaaatagttatcagaagtatgacgagcatgtacttataccttactcatgagtctaaagacgctattgagaagaaaaaacataaatataacaaacaagatattacgctgattaataactttgatattgatagatatatatcgcttgatgtggaagacaaggacgatatgttgaatactgtatgtgatttgattgatgaatataggttaactaatatacgtgaactaaaaaggtttgttagagactatggtgataaatatggtcttcctagcatgaagataattaactctgttttacgtgctcatactgctttagtaagactttatttcgatgcggtttatcaggaacgtaaatatggaaaacaaattgataaagaaacgggcgagattaaataaattgcagtccgaaaaattatgaaataattttaaaggcgcacttacacatcaaataaattgacgtcatgctaaaccctaaaaacctgtataagaagttgcctttggtaacaacaaaaaaatagaatatggggattggggcagcgccccaaaaataaaaagaatcgtctgaaacgaggaacaaactaaaatgtaaattttaggtgtgaccgagtggaggatgattactttttactgcatgtgtgtacacacatgcgaagttcaccacaatactttataacgtttttatttacatgagcgtagcgaattttatccaacacgcctgacggaaaaagagtacagtttcacgtaagtgatctgtactcttttttagcacaaacctatcaatttttcgtaagaaaaatttggggggtataagtgcgcccttaggaaaataatttgaatatatttggaatcaaaaagagtacctggcaagtgaacttcacgaattgaccgaagaagaaaaaagaacccttaacaatcccaaaacttgtcgaatggtcgacttaatagctcacgctatgccgacattcgtctacaagtttagttaaaggttcttctcaacgatcaataaattttctcggcataaatgcgtggtctaattaataataattccataaatcagaagtaaaattgacgatatcaagataagaagaactcgctcaaaatcgctcgttctaaaaccattaaacctctaaatataataaatcctcatcgtaatatttaaccccatcaaatagagcttttggttcagttccataacacttaaatccaaatgattcataaaaagctttagctctaatattttcagtcacaaccgtcaaagtgataacttctaaaccctcaagttttttcgctcgctcgactaaatatttaactacgtttttagcaacgcctgtacctctatattcctctgtacaatacatagcaaccaacatacctttatgttttaacttttctccttcaagccgaataaattttgccatacaaactaatttatttttatcgaatccaccaacaacaaattttgtatcagtcggttctgttttcatttcaaaattttctaaaggaaattctatttcattttgatatgtagctgcaaaagcattcggatctgtctgcaaacctgttaatctcaattctctaaaatcaactgcatcttttttatttaacactctaatctccaaaaaatcccctccaatttttaaaatctaatataacattctcataattttttattccaatttccttttagtgtaaaccaacggcacccctaaaagccaaaaaattctcccacctttttagaataacaatttttttcgtcttaatctaacgcgcttacgcttgtttgatttttattttttgattaaaaattaaaaccattttttaatcaaaaaagtaaaaatgaatttttaaaaactgatattttttcatgattatttttttcaaaatctatatatttttttattttttttataaatttctacgcaggtagaattaaaattttcgatcaaaaattttgcatcacgttggaacaacgtatagatgcgcccttacgagtttttgatttaagttcaagttcaaacccgtttttaataaaaaataaaatctattttgctttcaggcttcaaatttgccccttattagctcatcttttaatttaattgatattttataccccaaaataaaattcgaacgtaaaaacacccttaaggtagattgtaaaattaatccgaacgctgttcggattaattttacaatctaccataacaaatctaaaaaacatccttcgaaaaataagagaggatgatgttttatgcattggttatgggttttaattattggtgccatcattggtgctattgctggagcaattactagcaaaggaaaatcaatgtgctaatattgttgccggattagttggttcctctattggagaagctatactcggatcttggggccctcaattagccggaatggcaattattccttcaattattggagcagtaattgttgttgctgtagtttctttctttgtcggtaaatcaaagaattagtttttaagcttcatttaaggttcttatactaattatagatgctaacttaattagcacccctcgactttgttgtgagcgaagccaattaataatattcctgacccacttagttttaaactaagtgggctttttttgttcttgaatttacaattgaagtggaacactaagaaaaaagactgacccactaggagacagcgtagaatgttgtttgtcgagaacatcatcatacggaggtttcctaatgagccattacaatcagcttacaactattgaacgcggtcgtatagagtcttttatccaacttggactatcttttcatgaaatagcgacacgcttaaatcgcagtgttagcacaatctctagagaaggtcatcgctgtaacaaggaatacaaggctttagcggcacagaaagattacctcaagaagcgtaaggcatgtcgccgcccgcgtattttcgagaacgctgaattgcgaagtgctgttattagtgccatccaagacgatcattggtcgcctgaacaaatcgtcggaaactaccaacgtactgaaggctcaagcccgttcagcttcatcacaatctatcgcgaaatataccgaaataaccttggtatgccaagaagtcatggtgcgagaggcatcgcgcgtaaattgcgtcaccgaggtaaaacaagacataagaaaggttatatcgagaaacgaggaaagatcccgatttcacacaagctagttgagaggccgtcagcggccaacatgcgtactcgactcggtgactgggagcttgatactgtcgttggccgagacggcggcgacgttctggccactatgattgatcgacgcagccgcttgttattagcacaaagagccacaggtaggaaggctttgcctgtacttgaaacgttgaaagcaatgtttgcaaagattccacatgatattcttcatacagtcacccctgatcgaggaagagaatttgggcgacatggagaactcacggatgagtatcaagtagagttctattttccaaatcctcacgctccttgggccagaggaagtaacgaaaatacaaatggattgatcagggaatatattcccaaaggaacagacatcgctacgatcacagacgaggaaatcaaccgaatggtgtggcaaatcaacactcgaccacgcaagatgttcggatggaaatcttcgcttgaagtcttctggtcagagatgttccacttagcttgacaattcaagtatgaaaaaagcacttagcgtgttttgctaaatgctttaacatcgttgatttcttttttaggctttttgaataaagtcgattactttcaatttcatacctttggtaatcggatatttttttaccttttcaatcatatcttcctttgtatttgttttgagttgttccttgataaccattgtaataattttttcatagccgaactctgtaatcttatcagcaaaaagtccaatcaaaagcaacaatccagcaccaccaagcataccaaaaggccctaaagcagccaatgcagctgtaaatgcggcggctccagcaagtcctgtagcactcattgccacaagtagaattatggcaggtataccaaagcctgcaagtttttttaccagttcatccatcgactattcctccatttattcctgctcatcgttatagtgagcataattcttggttccgcaatatttacactggatgtatgattcaattccattctcatcgtccttagggtggaacgttgctcccaacaaaggcttcccacaattgctacaaacaccaacattatcgattttaactgtttcttttttctttctatttttccatttgtaagcaataactccgccaactgtcgtcagagctaggactacactacctatgataatagcttccttaccactaatacctttggcagaacttgaggctgatcttgtcatattgtttgaaccattatacgatgatttagctgaagttttaggcaaagttttatgaattgattttacaacgtcaatttttttttcgacaactggttcaacatcgtaagaataacttccttgttgatacccaccatttgtatactgatttccaaagaaaggatgtccctctggtgctcccataatctttacctccccagtttacaattcaagtgcaacaccctgacgactaggccataaaggccatgaagacctattcttgttagtgctagctaaacaagaaagcaggaatcttcatgacccactctcagactaacacccacaagcattaccaacaactcagttttagcgaccgtgctacaattcaggcccttcaggctgctggtgacaccgcgaccgtgattgcacagaagcttcatcgtagtaaagcgacaatctcacgagaaatcacgcgtggatctgtaactcagctcgactcgaagcgtcactcgcatcaagtctatcttgcggaaactgcccaagccatgcacgaccgtaaacgcgatagaaccggtcactacgcctttcttaagaccggccgtgcgttcttcaaggctctcgccagggaggcttcctacagcctcccttttatattgttattatagcatgacgaccatgatggttaaataaaacaaagatctgatggcctcagattgagttaaccctcattttccattatggttgttaaccaggtagagaagataaggcggtggccgcttcctagtgaagggggtgatgccaatggtgtacttaccagaagcatcgctactccaaggaaaggagtggcctgcatgtccgttgtggacgtgcttcagttgttgctggccttcggtaattttatcgtggacctgctgatgctgatcgttgcgctaatcaaacttagtgcaaaaaaatagccgccttagcttggcacagctagcggttattttttaactaacagtaatggtcaccgaaatatcggctctacccagggaggcttcctatagcctcccttttatattgttattatatcatggttatcggaccggtcaaataaaaggacagatagaaaagggcgccagtggttcaattaatgaactcgctgacgccctttgatttaggaatgtaatgttccttgcggtatctctaacttagccatacggcctgtcgaggaggttagtcgcacttccgataacgtgctccccaaccgcaggcctagtggctaagtccggacggagaacgatgcgttccgcatcaacccctgtcctatccttagcccacggcctgccttatggttggtccgcactcactacttgcccgagtccccgtagttggagagaacgcgagcggatgggtcgtcaacgtcgcaaccttcccagtcgctgtttggcatccagtagtccttgatccattcggccttgcccgggaagaattcttcaaagatgtcgcggtagagcaaggattccttggtaaacggcgtcttgtaggcgtacttttcgctggccttggccacgtcttcatccgtgtacttggcgtcggcgtattcctttaagtcgtcgaccagggagtgaccaacggcatcggagaaggccgccttttcccgcatcaagatgtcgtctggcaagtagtcttgtccggcaaaggccatccgcaacaggtacttacccttgtcgtagtggttcatcttcatgtccgggtctaaggacatcacgtattccacgaagtcgaggtcggcaaacggcacccggccttcaagggagttagccgagatgcaacggtcggcccgcagcacgtcgtacatgtacagttcacgaacccgcttcatcgattcgctttggaaggcctcggcgtttggcgcgtagtcggtgtacttgtagccaaaaatttcgtcggaacattccccggtcaggatcaccttcaggtcggtcgtttcgtggatcttcttgcacaataggtacattccgatcgaggcccggatggtcgtaatgtcccaggtttccagggtataaataaccttacgcagcgcccctaaaacatcgtcgcgagtcatgatgaattcggtgtggtcagtgcctaagtagtcggcaacttcgcgggcgtacttgagatcgatcgggttgcggtccatcccgatcgcaaaggtccgtaacttcttgcccggcattaacttagatgcgatcgagcaaaccagggaagaatccaggcccccggacaacaggtagcccaccggagcgtcagcgtggagccgcttttccacccccttgaccaggtaatcacggatgccggtcgtggcttcttcaaagctcggcgtgtgcatccgggtaaccatggccgggtcgcggtaggtaacgaacttttcgccgtcgtagtagtggcccggtgggaacgggaagatttggtcgcacaagtccatcagggtcttggccgtggaaccaaaggcgatttcgcccttctccttggtgtagccgtaaaacattggccggatcccgatcgggtcacgtccggccacgaccttcttggccaccttgtcgtataagacgaaggcgaactcggcgtcgagcatcttgcacatggtgtccagcccgtacttacggtagagcgggatcaaaacttcgcagtcactagagctttggaagctgaagtcgtcttttacgttctccttgagctgtaagaagttatagatttccccgttgcagaccagggtgcaatcttcgcccttgaagggttgcatcccgtcatcggacaggtccatgatcgccaggcggttgaaaccaaacatcaccgcgtcttcttcaacggtttcggtcatgtccgggccgcggtcaacgtttttctccagggcgtcgcaaaaggtcgttaaatcaaattccttagaatcaacagctaaaaatccgcacattgtaaagtctcctttgtggttaaaccgtggatgaaaaaaataagcctttcaccccttgcttttttgacaagggacgaaaggcttatttccgcggtaccacccaagttggctagggtattactagcccactttttattgagtacaaacatactcatccggtggtaacgttccggtcacgactaagcctactttgcaatgcatttgggttagtaatcttcgaaagtgttattcaatcgcagagggttggtcaggtttccactagccctgactcactggacaaatcaacgacctactcgtctttctaatttttctcttatttaatttttccaattatagcaaactttatttaagttggcaagcccctaaagcgatttttttgaaaaaagtgccacgccccgaccaaaaaaggggccaaaacggggtgaagaacgaacttctcaaatcggggtgcagatccggttcggaagtgcaaaagcgcacccaaagaagcttattaaccctttctaataaatcggctaataattgattctataataaagtatgggtaaagaaagcaagtaggggaggttaattcacccatcgggggcgagaagtagacgaaaaacgcaccaatgtaattgaattatggtgattatttatacgctcaagcatcagtagacaatatataggtcgtctctctagcgccacaacttctatttggtaacggcctgttctgggattgtcctcaacgactggctaacttgttcttgcaatttacgatctttttatattgcacttcttgcgatatctgataaaagttgttcgcttaataccggtattacgggcgacgtctacatcactcatgcccgtctgataaagcttaaaagcatgtagtaagcggggatcatcttcggtatattggggtttgcgcccatgatatttcccctgctgtttggccagaaaaatcccctgttgttgacgctcaataatccgcttccgttcactttcggcctgatacttatacagttcaatgattaagttggtcatcagttgacgcaagttaggatccgcaatccccgtcatggacggcaaattcaacacatctagggtggcacctttgttctgaatggtgttcataatcttagttaagtcctggttgtttcggcccaagcggtctaattcagtaaccaggacaatatcgccttcacggatataggccagcattttttgcagttcaggtcgcttggtgttagcaccacttaatttatccgtaaataatttatcaacgtcttttaaagccgctaactgtcgatctaaatgttgctccttggaactcacacgcgcataaccgattttagccatttccaattctccttttggacagttctaatgaacacttgtaattcctagtatagcacagaaataaaaaaggccactagggtatgccctattggccttttataaaaaatcaagtctaaaactttaaacctcttgattgcaataacgttttaataattaaacatgcttttatatttttgaggttggcaaattctatgcttataacttaggtactgcgtcaacttataattggcttttggtcattggaaagcagatacggtgatttctagtcgaggcgagtcacgatcatgtctggttactttcgtagaacgtaagacacgacctctatgggccatcaaagcccctaatcgaacggctaaagccctaaacaccatctttggcaaatttatggggcgccttcggtccctgattaaaattcattactgttgattatggtgaagagtttgccaattatcaggccttagaacaggattgatcagatcaaagtctgtttttgtcatccatattcaccatgggaaccttgttaccatggtgaatattttaattgacggttacgttggttttttccaaaaaaaagccaactttagcccggtaacaattagtgagatcctatcagcacttgaactaattaatcaacgaccattaaaaatgcatcatcaacagacggccattgaaagttttcgagcttgttcggattaaacttgtaatttgccacaaattaaaaatgggttgtagaagtctagtaaattactaaactcctacaacccaactttgtttttactaattacactaaatactaacccattacttttgccaagctaagtaatgcgcgactttaaagataccaaggacgaccaaaatggcgcctagtaacgtccaaagcatgactgcgccgtaaagcggtgtcatcagaagaataatccctgcaataatactcaaaacggcagagaatattgtccaacctttagaaactgctaattgtactgttcccaattccacaaagccttctaccaaccacgtgattcctacaaaaatcccgactagtaggaataagtaggttgcgctagcagctaaattaacgcatacaaagattccaacaatgagatacaaaaggcctaagagcaagtgccctagtcgaacccatgtattttcatcaacttctttaaaaatagaaaggatgtcgaacagcccgataatgataaaaacgacacctaccatcaccgtgacacccatggctgattgcccgggtaaaaacaggattaatagacctaatattaaggacaataagccattcacaccagttgcttggcgtaacttattcgaaatattctttgacaacaccttgaggacttcttccataaaaaattttcaatctttagttttcagagtcgaccgcttgaatgacaatctgatcatcaactaaatctgcctttaagtctttgacatctgcatgatcgaggtaaaaatcagtgaccttatctctgatttgttgttcaataacccgtcttaatggacgagcccccattgcctcatcgtagccttcttccatcaaccaatccttagcttcttttgaaacaactaaggttaattcttttttagctaatgtttgttcaacgttggttaacattaaatccacaatttgtgacaagtcagctttcgttaaatgcgtaaattcaacaatcccgttaaaccggtttaagaattctggtctgaagtatggtgctaacttatctaataacttagcatcttcttggtcgttcatggttaatttttcattaccaaaaccggcattagatgtcgcgataatcaccgtgttcttaaagtcgatcacgttcccttgaccatccgttaagcgaccatcgtccatcacttgtagtaataatgttaaaacttgtggatcagctttttcaatttcatcaaacaagacaattgaatatgggttacgacgaacgcgttcggttaaggtattggaattatcgtcatagccaacatagccggctgtcgtccctatcaatttagaaacggctgtccggtcagcatattcactcatatccaaacggataatcgcttctttattaccaaacatatctaaggctaattgttttgctaattcagttttcccgaccccagttggaccaacaaataagaaactgccaattggttggttaccttcagaaaaacctgcccgatttctgcgaattgcgcgtgctaccatttcaacagcttcatcttgaccaatgaccttgtcttttaaccgttgacctaagttcttcaagcgttgaatatcattgctccccattttagcaactggaatcccagttaatctttcaacagattgcgcaatatcatcaacagtcgcaatcattacggccgcatgctgatcattattttctaattgcgtcttaatcttctcaatccttacttttaaatcttcagcagcttgataattctccgcctcgacagcttcggctttatccgcttctaactgtttaagttcagctgccaatttagctttatctgtttctggccgtttagctgctaaatgagcggcggtcatatctaataaatcgattgccttatctggcaacgtccgttgtggaatatattgaacagaatagtcaacagccgctttcaaaacatcatctggtagttcaatgtgatggtgtttttcgtacaaacctttaatcccttgcaagattttaaccgtatctgctgcgctaggttcattcaccagcacatcgttgaaccgtcttgctaacgcggcatttttcaaaatagtattgcgatattcatcttgcgttgtcgcaccgatgaccgtcaattcaccacgtgataaagctggcttgataatatcagctaaccctttgccgccatcttcgccaccggttgaacctatccctaaaatctgatgaatttcatcgaaaaagagaatgacgttcccggctgcttttacttctttaattaaatttttaatattttcttcaaacgagccccgatattgtgtcccggcttctagtgatgacaaatcgattgagtagatttctttatctttaatggtttcaggcacttttccagccacaatttcttgtgctaatccttcaaccaccgcggtcttcccaacacctgcatcaccaactagaattggattatttttagtccggcgacttaatatttcggctgtttcttggatttcattataccggccaatgacaggatctaataaaccatcccgtgcttcctgggttaagtttcgacctaatttttcaagaatgccaccttttttaagagcatgttcaccattttgcttaatttcaatttctttttctcgattaggtaatttaccagttgcccgatactgagcaaactcatccggtgataattctcgtccgttaatcacatatcgcgctgactctgaattccccattcttctaaaaacttgattgaagatatcatccatatcattattaaaaaatgggtcatttccgtacatatttgccatacaactgcacctccattattttaaacattaaatgaccattagttatcttatcaataacctaatcattttgcttatggttctattataacaccttttagcactctagcaagaaaagtgccacgaagttttagtggttaactatattcaaaattgataggtagtgcattttttcacgatgttaatagtctagcattcgaattaatcccccacacaacaccggttaaatcgcgtccaaaaaaagactagctcatcaatgacggactagtctttttcaatattactatttagctttatttttcgaaccaccaaaccatttatccgatatgacaatcatggctggtaagattgttaaggccgcaatcagtgaatataacgtatccaagacggtgattaacccgaatgagctaagtactgggaagctcgtgaagatcaatgcggcaaagcccccgataacagttaagcctgaagcggtgatcgcttggccaacgtttgtaacagcaacaataatcgcctcttcagtggacttaccaagttgttgctcttccttgaaccgttcgagaattaaaattgtaaattctgtgccgacacctagcactaaggaactcaaagcaatcgttaatggattataagattcgcccaatagatggagcgtcaatggtgataatcctagaacaattgcaattggtaaaattggcaataatgccatttttagatcgcgatagacagcaattaaaatgaccgcaataatcgctaagcccgctagaatgattagcgtatggttgacgaccatgttgccaaccccaacgagcatcatgacgctatcaccggctgggtgcacatctaatgttgtcgcatggtgtttgagatcccgattaatatggtgcattaatgtccgttgttgtccggtagttaaggatctatcgactttgaattgaaccattgtataatggttattcttactcaacatcgtccctcggatagtccccggaattgttttaatgccttcgttaatctcagtttgtgtttgttgctttggtgtgccgcccatttgacggtaagtactatctaatgtcgtgacaccaacgatgtcttgatacttatgattctcgcgattggcgaactgtgttgttttagccaagaccgctttatcgcggacgtcatctgctttaacaagataagtcatataggtggttgaacccacttgtttttgcaagtacttcgtatcctttagtgcttgcatatcttgtggaatcaacttggttaagttcgtttcaattggaattcgtccttcaacactaaaacctgttgctgctaaaatgatcccgactagcgttaaaattttagcgtgtttaatgacgaattgcgcgtatttccgtaacgcttttgctaagcctgacgttttaggtgctgattgtggcttagcagttgttttactcttacgatctaacaaggcaaagcttgagaacattaataagaattcaacaacataagctgtggcaaccccaattgctaaggttaacccgaattgttgcatcattggtgcttttgataggaacatcgttaagaagctgaaaaccatcacgatcaaagcaaccccgaccgcagggcccatcgtcttaattgcccgttttgtcgcctgttcacctgatgctgatttgtggaattcttcctcgtagcgattatggaattgaaccccgaaatcgatccctaaaccaataatgattggtaaggttgccatcgtcgctaaggttaagtcaatgtgtaaccaacccataatcccgaaagtccaaattaagcctagtaacacataacatagtgataatagacgtcgacgaactgggaagacgacgaacaaaacaacaaccataatgataacagctaaaactaacatcgtcgccattgttttcataacgagcggttgaatcccacccatgatgactggattttcagctaagcgcactttaaggtctgattggaaaccagcttgcttaatatcgtgccacacatcatgaacgacttggacattagttgtcatatctgttttggctgccatattggccatgattaacaagttctgtccatttttaggtaataatgcggataattgtgaacgcacatgtcccttgctatcaagcattaaatcacgtagcaatgccgttgacatgtgttccacttttggcaaatcagccaacatttgtttttgaagcatttgttgttggtcttgatttaaaatcgtgaacagatattgttgaacctttacttgttgcattttgtctaattgtttcatcaaagttgctggcgattgattgccagcttgtgccgcagccattttttgttgtgacgttaataatgagagcccgtattgccccatttgttgttgttgctcaggtgttaaactcgcctgtaacttagtctgcaacgccgtcttttgagacgttgttaagttcgccattaaatctttttggagcttgtcagagcccttggcatttccgcccatcgtgctagcggcgttgctctccaattcctgattgagtagcgaaacgacactcgtgctactgcggatatgatcgaccttgttaattttattttctagggccaccactttcttcatcgtggtgtgggtcacaatctgatcctgatccccggaaatgagtacatacgcggaaccgccaccgaagttttcctgataggttttggtgtctttgtaaacttgcgaattcgtatccacgaatacttcattacccatattcatttgaatattggataagccgaatgctaagccaatcgttaaaagcacgacggcaatgatgactttgattgggttgttatggataatttgactaattttagtaaagaaacgattcgtcattagtagtcctcctcttaaatttaatatgctactcagtataaatagctgatagaatggaaggaagacacaaaatgacagatgtgtaccgtttttaggaggttattagatgacaaaaggggaacaaacacgtcaaaagattatcgaagcaaccgtcgcactcatgctcagcgacacccgggcgtccgttagtcacatcattaaacaaacgcacgtttcgcgaaccaccttttaccggcactttccgagtctcggcgatgccattctagcagccaccctgacccgcttccccactagttaccaatcaatcaccgatccagctgaactcttagagctcgtcattaatacacttgatcaagacctcgcattcttcgttcactttagcgtttataaggaagaattcgatttcttattcaagcaattattttttaaagtggccaataacgttcagattaccctgcttgaccgaacaccggtcaacaatgagttagtttaccgcgccatcagtggcatcgttgccggttggatgacaaatacaacgacgatcaaggccgccgatgttaaagggtttattcaacaaattctgaatctctaaaaaaataaccctcggcaatctgccgagggttatttaagaatctaatgcgcttgatgagaaacccctgtttttacaacatctgatttcttgggtctaaaacgagcgattctgctaataaaagttcactgtaaatttcatcaatatcatcggaactcgctaaatgatttttttccaactgaaataagtagtcccgttcagcatccagagcatgcattaatgcgcggcgttgttcgccgccttgcagcttggtcaatcccgctttattggccgtaaaagcgtgccattgttcaaaaaacgaccctaatgtatttttccgaatttgatcccgtaaatcataaatgacaattgccttaacagcgggggataacgccattgcttcaagcgattcaatcccttttgtcaccatatcatgacggattcgtgccaattctgtcgtgcgaatttccgcatctccatcaatcaacagtaagaacttaaataaaatcgtgggcactaacatacttaaaataataaccacagtttccacaacgatgatgaaattaaataactgcaggctaatttgattagcaatcgaaaatgtcatcgccagtgtcactgccccgtgcacaccacctaatgaaaatagccacgccgttttgcgccggcggtcactcacaaagagacgtgcgtaaagatagcgacagattaacagtaacccatacacaaccacaccaacgatcaaccaagtaagtgagccaaataagatttgtgagtgactgactaggattcttgccaaactaatcccgaaaatcacaaagaccgcactgtttaaaacttccgtcatcagattaatcaattgaatccccaaatgcatttgccgtggcgatgaaaaacggctgcgattggcttcgctattatgaaccagccccgctgttacaattgcgataatgccggaaacctcgatcttttctgccaaaaagtaaatcaaaaaaggcgttaataaataaaataaggtctgtgacgaaatcacattgcttgtcgaccgcacaaaatactgccgaaacgccatcacgataaaggccaaaatgataaatggcccgtcgttaaccacaagattcctgcttgtaataaaataatgcccgttgcatcattgaacaacgattccatttttaatatattcctgattggttgagggattttacgcccttcaaccacggcatcaaaggcggttgcatcggttggggttgcaatggcgacaataattaacgcgaccggtaaactcaataacaacagacgactcgtgataacagttgctgcaattgccgaaaccacggcgaggataactgcgacccccataatacttttcacttttttgccaaccattaatagcggcgttgtctggccttcgaaaaataatagtggtgctaaaattaaaatcatgaagacttcattattaaagcccagcactaaatggttcgtccagggaattaccgcgacaataacgcccatcaataaattaatgtaagtcccagctatgtgtttggtataccgagcaataatgttactaaaagcgaccgcaatcgcgatcgctaatgtcgaaattagcagatccatatagcgctccttcattttcaaaataagtattgcgataatttacagtatatactactaagccccatttaaaataaaaaaataggcatccaggctgaaaaacaccacgatccatattcctaaattagcctaacattttaactaagtgttggacggtgccactttcaaacataatgtataatcccaaaccgatataaaccactgccgtgatatacattccataccgttccagaatttcagcaaccttcggaattttaatcaataagtagccaacatagcaaaaaaggctcaacatgaagaaaaatgtaatcaatataaccgtcaatgtttgcgccgttgattgggcaaaaattggtacgtaaatcccaatattatcggcgccacacgttgcaatcgtaatgattgcgacattcataataatattgcgccgttttttcatctgactctcaacgacttcatcatcgtcactttctccgctgattaacaaccgcaagcccatcaaaacaggtataatacctaataaacctaatacccattcttgtggtacaaaacctaggatgaatgccagcactaagcttgcagcaactaagacacttgtccctagcaaatccccccaataaacaagccaccgttccttacgatttacagaaccaaaaataaccattaaaataattaagtaatcaatgctcgtcgaaatataggctgtaatgccagttaatattgcagtttgcaatttatttccccctctaaagcaatttatttaatatcacatgttgataataacatatgaaggagaagacatgttaaaaaatgaagctattccgctaaataccattaatttaattcctgaacgtaacctcgaagaatcaaaacgcattttaaaattgctcagtaatccgacccgactccaactgttgcacatattagcacagcgcgagtgcaacgttagcgaacttggcgagctcttgcagattgaacaatctgtcatttctcaccaactagcgatgctgcgtgatcatcaattagtaagtgccacaaaacacggtaaactaagctattataaactagatgatccccatattttagacatcagcggtgaagtgctagaacacgctgatcacgtcgttcgcggaaaacaacatggtcaataaaaaagactaatctcaagaggagactagtctttttttaatcttaagcagatcttttaaacctacaatacgttactttatggcgcaaccgttaaatgccacttcaatgttgatgtgtattctgtacggtaacgttcagtcgtttctgggacatgcaggccaatactataatcagccgttcttgcgtcaccaaattgatatttatgaactgaatagccagggatatcataactgaccccgcctttattgtcgccgtcttgattaaggtactggccttttcgttcgtattcaactaattctaacggctcagccccgggtaccaagttaaagtttgatttagttactactttatcctgcaaattcgaaacagacttattaccttccgtatgcgtgctcaatgttgcattattaaactggagttgtgcgccggacagctcaactacttgttcctttaaatctatcgtggcactgccatgaaattgttgttcctgtgcaacactcaacgtccagcccttaatgccccaataatcagagatttcaatgccatatggtgttttttcatcagctggtttctcaatttgtgccggcaaataaaacgtccgttcactttgcgtatcgtcgaatttaccaaaattcagtttacttggtaacgccgtaatcgctaagcgcgttttttcatatctaaaagtataggtcaccgatttttcttcaattactggatcaacatctttaatatccgcatagaccgcagcgtttaaatcagttgccgtcgtaaaatcaactggcgtataaccttcaatgtaggcgggccgaatcttattaggatcttgcccatcgctaatatcagttgcttttaatgctgatattttggcattaattggcccagttgcaacgacttcattagcaatctgctgccccgtttcacgatcaatataactaaagtgaacgtcactattcttcgtcttttcaatcgttactgacgcgtcagcttgcccgttcataacaccctgattagcttgttccccagaatataaaacaatatttttaagcactgtgcctatcacaacaccttctttgactttagccttataggttaatactacattctgtccaggtgtcatttttttcaaattaatctgtttaacatctgctggggtttcaactgtcttatcgctatatgtcaatttaacagagcccggcactaattctaacccttccttagctaggtcatcggccaagacaccgttagacatatcagctccgttactgctgactgttaacttcacttggtaatcaagaacatcatttacatgcccgaccgtcgctttttggtacgtcgtttctttttcagtttcatttaaaactttcttttcaatttcgacaggttcaacttcgactgggattttcgtgctcgccgtagccgtatcaaaactgccagtcccaccttcagtcttagcaaccatgctactattaattgtttttccagaagctttaccattaattttggcatcgaaactgatcgatgaccattcattttcggccaaatttttgggtaatctaaccgttaacattctagtcgtttggttatacttactagcatcaattgctacttgatcgccattattcagagttactttaattgtactaggatcaatatccagttcatctggtatttttgacgttacgttaatatctttccattcactactataacctaaattatgcgttttcatttcgatggtaatattatcttgaacgtgatttttttgatcacttgtcgttttatttttataggtctctgccgcttctgggacaactaagcccgcagtcgcaatccctaaatcatttctaaaatgataaacggtatctggctgaaaagtttgccaattccacttagcgctatacgcagaatcacttcctgaataaacagtagccccttcttttagatttttaactttgatacccgtaccatcaaagttggctggcgaataatcattcattgcataatcagataagttatatccaccatttcggtgataattcatcgcgttaaatttggctggaccatcctcaacacccatattaaggaatagtttatatttaccatcggcaatgtacatcccagcgttattcccttgcgcagaaactggtacgccatcgttaccatttaacgaagtatctttagcaaaaaagatcccgccatcaattgctgccgatgtcgcattataaatatatagttcctgttgaacagatggtttttctagtgacggccgtaatagatactcaagtgtgaaactggggacacgccccactatggttgtatattgccccaccatttttaaaattgtctgccctttggcgtctttggcttgataatattgcacacctgtcagtgatccctgtgccgatgtcgatgtggttttaatcgttggtgccgtggaacttctagtggttaagagtgaatagtcatacgagcccccatcccagatgttgatttgaatgaagactcgacaatcttgccattatccttaatgaaaacgttcattcttggcggcatgttattcgttattatcccaccatttccttgatcaaactttaaggtcccatcactattaccaaaagtataattaaggcttttattagccgctttatcaatatcaatacttgcaatcgttgtttgctttgccggttgccaacctgtcacgccatcatcaatagtagctgtcggcattattgtatctcgtgattgattctgaatcacagacttatctcgatgactactcgatgactgctttgtcgtctcagaagaagacttttcagatgacgtcgttttagattcagacttagattcagatttggattgggtactcactgattgttctgagtgactacttgtttttgaatctgttggcaccttgatttctgatgaattatcctgtctttggactgcgttgacaacgttctcattaataattacagaacttattaatatcagtatcaacattaaccaggttactaattttttcaaaaatagccctccgttatctaaataattaattggtactcaaactgtaacattccagcaaaaatagcactgctccaagcacatctatcaagcctttatcaaccccgttaatatttaacatcaagaaaaatacacagtaacaatatgtaaatagtatattacttgggcaatgattgcaagtcgatttctcactattaaactgtacacaatctataaactgctttataccttgatagaaacgtctttaaataaattatccctactttattatttaaagccacagtgaatatcggctatttgggcaaaaaaataggtcagttctttatgaactgaccttaattggactgatttaattcctaaatcaataaaaaatggcggaaaatcgcttatattagtaacctcttttaggccaaaagaccgcttttttgtaaccaggtcgtcacttctttagcgacggctgctttagttggaccttcaattgctagtaactggccgttggtttcttggccaccagcaaccgataagattggcaagactagcgcatcgccgacagcagcttgaatctgtgcaaccatttgcccggcgccataaccgccgtgtgtattaaacgggatgattgttttgtcggtgaaatcatacgtcgctaggaatgtcagcactgcttggggcagtgccatgttccaagtgggggcaccgataaagattcggtcatactgttcaaaatccggaatatttgtttttaatggtggtaattgattttgcagttgttcacgcgcattcagatcaacctcagcgcgataattcttgggccgcttttcctgtgtttcaagtgccactaaatcaccaccaacttgcgcgtgaatcaatttcgcaactgcctttgtgttcccagtacgtgaataataaacgattaatggtttcaattgacaccctcctgattaataaaaatctggtttggctttattttctgagccgggttcccataacccaatacttgcgcggacatcattgcgtttaccggtcaaattatcaacaacgaattgagcgatagcgtaacgactgatttgcgcgcctaagaatggttcccctttaggactagccacgtaatcagtgcgtttagcgtcatacaaccaagtcattcgcatataagtgtagtcgagatcacttgcttcaagggcttcattgccgcgatgttgcgccaccgaaccgcccatcattttactattccaagtggcaaaaggttctgcgacttcgccgtagacacttaaaacacctgcttggataatccgtttaacaccggtttcgtgcatcgcttcgatgacgattttggtaatcgctaagttatcaaagttcatataaatcgcatcttggttttgcatcacattaattaaatcgtcgagttgactcgcatcgccagagaccttagtgacattgtcataaggtaaattagcggcatcactcccaaaaagtgtgagctttaaagttggttctgcttgtaaacggggaattaaaatcgctggaatttgaccaccggccccaataattaatacatttgtcatattatttattctcctttagcgctgctaagctcgtcccaaaaatttgttcaattgccgctggatcacgatgatcgaaaaattgactttcgcctttgtccaaatcattcatcgttgccatttcggctgtggttaattcaaaatcaaagacattgatattttcggccatccgattttggtgcacagacttcggaatcaccacaatgccgcgttgaagtaaccatcttaagatgacttgtccgtttgatttaccgtaacgctcgccaattgccgcaattcgttcatcagtaaaaatattgtatttgccttctgcaaatggtgcccaagcttcaacttgaatctcttccgcttgtgcaaaagccacttctgagtgttcttgataccaagggttaacttcaatttggttaatcactggtttgacatcggttgataagattaaatttttaagttgatcggcatagaaattagaaacgccgattgcgcgaatcttgccggctttgtatgcttcttctagagcccgccatgccccaatcacatcgccaaaaggttggtgaagtaagtaaagatctaaataatcaacgcctaaattttggagtgattggtcaatcccttttttagcacgttcatagctcgcatctgatacccagagtttcgaagtaatgaatagttcttcgcgcgccacgccgctacgtttaatggcccggccaactgcggcttcattatggtaagctgccgctgtatcaatcaaacggtaccctgatgcaatcgcatcaaccactgcttgttcacattctgctaaatccgtcatttgaaaaacaccgaaacctaattgtggcatttgtacgccattgtttaattgcaccatatccatcgttgataacctctttttctaattgatgactttagtatagtgcgcagtggctcacttgaaaattacttaaaaaacatgctagtatacattaaacgtatactaaggagaacagcgaatgttagattaatatttattagaacaattgacgaccttcgccaagactggcaccctcacgaaaactgctgctgctttgaacatcacccagccatccgtcacacgcggcatgcaaaagttggaagaggattttggtgtccagctgtttgaccgtcaagctaatcgcattaaactgacaccaacaggcgagcttgccgctcgagaagctgaacaacttttgacgactagtcaaacgatgctgactaaaattcaaaatttcgatcgcggtcagcactttacgataattggcgcaacgattcccggaccgctaaccctcgtgcctaaccgtgatgatgtgcaaatcaccaaagaattcattgcggtggatcaaattagtaatgcactaaagacagaccaagttgccctaatcttttcagatcaagaaatccttgatacgaccatcgaatctcaatacctcggtcaagaacagcttcaaattaatctcgatcaattcacgacgtttgctagccaatcaaccgttagctttcaagatttaggcggcatgagtttcgtcgtcatgcgcgcaatcggcccctggagcgatatgattaaacaagatattcccaacgcgcaatttatgtatcaagacgaccgcgccgccttcattgagattattaagcactcaagcctaccatttttcacttccaacctctcacaaaaggatgctttcttcaacgaattatcaccacatcaattagatagaattacggttccaattagtgatgaacaggccaagatgccaatttacgcaaactatttaacccataataaacgccaaatcgcctccattctagaaacaatacgagcaaattggccataaaaatagaccaacacgctctaggtgttggcctattttctaaatttgatagccctttgttttacaaattggtcaacttatcatatttcatcaagccaacggccaaactcacaagcgaggtgtaactcgtgttgtttaatcataaagttgggcagcattgctggaaactcgaccaaggctttaaaccttatgccgttttccgcttgtttaagttggtgtcggacaccgccaataataaacccattcgctaatcttgccgtgccgactaactgttcttcatatccttttgaaagaacagacttcaaatcttcagtatcaccataatgcgcataaaaattagtcagcaaaggtgaccccccagtaaattctagtacctcttgaatcgtgttactcatcccttttaaaacataatgatctggattcgtatttaagttaattttaaaatgcgcttgcgtatttatcagcatgatatcatcaatctgactagcaacttcttgaatggtgatgccgcttttgggtatataaaaatcgacttcactaaattttcgtcttccaaaagaaagtttgacagctatcaccgagattaaattgccaagtttatattgattgcttagtttgcttttcaaatcagccatgcctaagttcatcttaatgcttaagagtgcttcgcgcattttatcgatatttctttcagcttgccatttattaaagtcattagatatagcgccagtgctaatccgcttcagccttttgtagttaacttttaatcgcttatattcccacgatagaacggcctcttgagggatttgctcattattaatatagatagcctcctgattcatcttttacgggtcactcccatctactctatatgactcatcatacttataaaaatgcttattatccagtcgtgacatctaaatgatgggagaagttctatgaagcaaaaaagcgttatggtcaaaaacaccataacatctatttttcacatgcctgaatattaaacgttaaattagtcctaatcactttttattttgattcaaaccttttaatacctgcttccggaagcgtcctgggaacgaacgcgcaatcatgaccgttaagcggtcgtgaaaattgttgaaataacggcgcttgggttttgtatcggtagctgctctgtaaaagagattggccaagtcttctactgacgcgcccattcctggtgcatcatcacgcaacacatcagccatatatgccaccaatggcttataggcagtatctttcttcaaattcttatagatattctcaaccgcgactgatccccaagatgattgggttccaccaggttgaacgacgactgactgaatcccaaattgctcaacttcaatatccagagtatcgctccattgttgtaatgctgccttggtggcgtggtaatatgcacccaacggcgaatagatatcaccaccaatggaagaaatattaacgattctgccaaacctttgttgtcgcatccttggcaaaataagttgggtcaatgtaaccgcgccgaaaaagttagtttcaaactggcggtgaatatgctcagttggcgtatcctctacagggccattctctccgtacccagcattattaatgagaacatcaatgcgcttttgctcttccagtactgtcttagcaaatgacctaatcgattcatcatcggtgacatccagtgaaagtgcatggatatcctgacccgtaggaattttcccaactcggcgggcaccaccatatacaatccatccatgatctgcaaagactttcgttgccgccgcgcccatgccattagatgcacctgtaataatcacaactttttgatttgtcattgatattctcctcttatgtgcgttacacttgtaacttgtatttatgttgttgagtatagaatgacttttaaacaaatacaaccaactagaccctagatgtgacacataaggagtttttgtaatgtctacagcgaccaaacaaacacaagagtatttactaggtgcccttcaacgactacttcaaaaaaaagatttcatggacatcacagttagtgaactggcgaaggtggctggcgtttctcgaatgacattctatcgtcattacaagaatgtgtatgatttgctcagcgtcaatctacagcagatcatgtcggaagtaccttcttatgaatctctagaaacaaaagattatgaaacggcgattgtccgataccttcaatttattaatcaacattcagagttcatcaacatgctgttgagggctcagcagcagaaactattacatgaaaatattgcagcagtcatgcaatcattaatgactgctaaacaccaatctttgccattcaatggccatgaaatgcaatactacattgcctaccattcgagtggttacgccagcgtcattgttgattggatcagcaatggacgacaggactcgtatgagcagattgcggctttcctctataagaatattagcttgtgaccggtcaaactgtaatgtcccctcacaaaatacttctagtgctgcagattaaattggttctagcacctgcaaatgcaatcctatacaaagatacggtgaattgtggtaaaaaaataggctagtcctttgcgggactagcctatttgagtaaacgaaaacgtgcttctcaccctagcttcttccgtctagttacaaataagcgcctatcttccaaagttcggaaggtaggcgcttattctacactatactcagaagctgaccagggtggtcagcactcttttgaaccatgctcctggttgcaacaacttccgcttaatctaaaaatcaccttaatcttaaaaccaagattaaggtgatttttattaatgctcagttgctaaacgcagccatccgcactatattagtttaatttcttcttgcttactacgtttaagttttcgtctaaatcataaacaactggttcgcctgttgccatttcaacgtccatgatgtcttcatcagagatgttttcaatgtattttgttaaagcgcgtagtgagttaccgtgagctgcaacaatgatgttttggccgtcgattaattttggagcaatttcgtcttcccagaacgggataacacgttccaaagtaaccttcaagttttcgccaccaggaatagcttttggatctaagtgtgcgtaacgacggtcatttgctgctgaaccttcgtcatttgcatccaatagtggaggaagtgtatcgtatgaacgacgccatacgtgcacttgttcgtcgccccatttttcagctgcttcagctttgttttggccttgtaatgcaccataatgacgttcgtttaagcgccatgattttgtttcaggaatccataattgatctgaaccttcaagtgcatagtgtaatgtcttgatggcacgagtcaatactgatgtgtaagcttggtcaaaaaggatgccttcttttttcaataaagcaccagcgttttgagcttggcgtacgccttcttcgcttaagttaacatcaacccaacctgtaaattggtttgataagttccattcactttgtccgtgacgaataaaaactaatttagccatgtgtaagtaacctcactttttttatttttactctgtccattttacactgtttccatcacaatttacagtcttatcttttcagaaaataatgaacttcaatttaattgatatattgcccgggtaatactgcttattagccaagcaaatcatttttatctaagcttcaatctggccgttatgaattagattggcatccaaaaaccaataatcttctggatcacccactaagcgactgaacggaacaggctgaatcccctgcccttctaatttttcaattaaatacgcccgtaatatccacggattattgatgtgtcgtgtttccaaattcaatacgttttgactggtcccttcagtagtgcccaaatctgtcgctacttcagctaaagagagaccagttaaagcaaaattagcctgtaattcacgagtcgttgcttttctttcttgcggatttaatgacatccaaaagacttctttctatatctttatttttgatcgacactttttgtttcttttaataagaagagtgctgctaaaatggcaatcaccattaagactaatgaagtcgtgacaacagcaatcatccctttatcaaaagctgtgaccaccatttgttgcaccttggcagcatacggtgttttcactaattgttgactccaagcgactgcgtgccctgaaaaggcgcccgcttcgactaatgcttggtgaataccagttgctgcagcctttggcattgaactcccactaaagccagcacttaagctactctcataggcattcgtttgtgataaaccaagaatcacgacaccaacggtaatcccgatttgacggaaaacattcaataaaccggatgccatcccaatttccttcgggttaatattatccatcgctgctgtattgatcattggattgataattgcattccctaacccagttagcgcaagcaatggtaagagttgcatgtaagtaaagtcagtcgttgtcacttgtctaaaaatcaataaaccaagtgccgaaactgtaaacccaaaagcaatcatccattttttaccaaatttataccctagaacacccgtaaatggtcccaaaacaagtgaccataaactcattggcaattgatgcacaccggttgaaaaggctgagtagcccatgtaattttgcatcaaactcgtttgataagcggccaaggcaaagatcccagcgcctaacgagaaggctaaaatcacaacgcctacgaaatggcgattcgtgagtaacgtcaagttcatcattggtgcttttgccttcaattcaacaaagacgaagagcgctaaaattaaaacggaagcgactaaccaacccataatccgcatatctgtccaagcccagtgcatgtgttgttctttttgaattaacccataaatcccagagaataatccgattgctgacaaaatcatacccataaaatcgattgattcgcctgcaccatatgctggtgtttctttaacattacgaatcactaagtaaaccgaaataatcccgactggtaagttgacgaagaaaattgatggccaaccgaagttttcgactaagaagcccccaaccaaaggtccaatggcagttgaaaaaccaatgacggagcctaaaattcccaatgcagtcccacgttcgcgaccttcaaagttcgatgccactagcgccatcgataaactcatcataccggagccaccaattgcttgaaccgcacgaccaatatccaatactaataagtttggtgccagtccgttaacgacagaagctaccgtgaataaaatcatactcatgatgaaaattttcttacgcccgaacatgtcccctaatttggaaacaattaacaagctgaccgcatacattaacgtgtaggcgttcaatacccattgcaagttactaaaagttgttttaaaatcaaccgccatacttggcaaagccacattaacgacggtcacatctagtagtcccataaagacccctagactcatagcgactagcgctatccaacgatttgttgtttttttcattttactatctccattttctcgatctctcttatttgtgcttccagccagtcgacctttgctttaagcgttgtgcttacaaaatccattgagcgaacctgccactgataataattggtatcggtcccctcttcatcccgtaaatctgttagatggtttttgacacccatatagacgtgtaaatcttcagctaactcatcgcggtaatcttgtaaaatactgatctgttcttcggaatcgatgtagtgcatcccacgcatcttaaaccgataagcatcatcccacttcgcatcgtgggcgactggtttagccattaattcagcaaagtaacgccggccttcttcagtgatatgtgcaatcttcgtaccacgcgaatcttgatcagcttcatcaaacccaatgcagcctttgctttccaatttatctaatagcgggtacaaaacgccatttgaaatttttcgacgaggtaacattgcattttccaagataatccgcaatttataacccgacatattccgactcattaaggctgataacatcagcaattcatacataagttcataacctctctcttcaatcagtcttttcgacaggtctttaagacttattaagtatagttctttccgacacatttgcaagtctttttttcacaaaccacaaaaaagacggcccacattcggttggcgaatcgccaagcctcgtgtagcccgtacttttgggtgcttaatttaatttttattgtgcttgaacactatctcgttcaaccaattcaactggtagcattttttgttgcatccctaacgttggtttttcgattcggttcaacaataaccgggtcgcttcttggcccaacgctaaaataggttgtttgatggtcgttaaccgcggtgtcacgtactcgcaccaatcaatatcatcgtaaccaataatcgaaattgactctggtaccgcatgacctagttcagctaacccacgtgctaaacctatcgccagctcatcattgacggcaaagatagcagtgacgccactatcaattacctgttgggctacttgatacccaccttgtttagataacggcgtcgttatttgccagttcggattaaccgtgatttgatgactaaccaaagccgcttggtaaccaataaaccgctgctcgatattccaagcgcgctgttcaggcaacacaatcccaatttgacgatggcctttttcaatcaggtaattagccgccattcggccaccttccgtatccgctacagagatctcatcactttgatgttgcttttcggattgatccaacagaatatacggtattttacgttgtttcagatgcccctctagtgtctcttcttcaatatgcgagaccgctaaaataaagccatcgacattccgccgaaccaactctttcagatagtaattgaccttctgattattctgacccgcactataaatcagcggaataaaatcatactgataggcgacttcttcgaccccttgaataaactgactaaagaagggattattgatatccggtactaaaaccgcaattgttttggtttctttattaaccatgttctgggcaaaataatccggttcgtagctgagtttttcacgtgctgctctcacccgcgcaatcgtctcagcgctaaaccgctgccctttattatttaagattagcgaaacagttgtgaccgatgtttgggccaaggcagcgacatctttaatcgttacttttcgtaccacgttaacttcccccattgaaaaaccctctatcatttaaaaacgcccatagccgactaagccatgagcgccttctaatctattataactgaatatccttttcatatggaattgaattttgtgcacctttagtttgcacggcaattgatgaagccttattggcataagtcattgcggcttcgatattgctgtaatccaattcgagttttgtacttaacgcaccgatgaaagtatcaccagcagctgttgtatcaactgctttcactttaaaggcaggcacaaagccagttgcagttggtgttgcatagaatgaacctttagaaccaacagtgatgatcaccactttgatgcctaatttgaacattgcttcagcgttggccttcattgaagcttcgtcagtgactttaatcccagtgatgatttctgcttcggtttcgttagggacaatcatgtccgtcactgctaataattcagctggaatattcttgatagcaggtgctggattcaaaattgtttgaaccccgtttgaacgcgcaatcttgaaggcttcgataatggcaggcactggtacttcgaattgcgccacaatccggtcagcttctttaatagctgcttctgcttcgtggatatcttcaacagtcacgtcttggttagcgccaccgtaaattaagatactattttggccgtgagcatcaaccatgatataagcttggcctgtcccagctgtttctgaacaacgaacgtgatcgacgttcatgccgtcttttttgaatgtgtcgagcatgaaatcagcggcaccttctttaccaaccttactaatgaaagccgtttgggcacctgaacgaacagctgcgattgcttggttagcgcctttaccaccaccagcaactgcgcggccatccattgctaaagtttcgccaggttgtggaaaacgctgaacgtttaaaattgtgtcgacattggttgaacctaatacgattacttttttcatttaaataccctcctggttgttaaaatacaacgccactttctaaaataatgttggaataaggtgtcatctcacctgttctgacaaatgctttggccttatttaagtcttgtttcatttgtgaatgattaataaattcgattggtgtctccccaattaaagctttaatcgcctctaattgttctggatttgctgttttaatttcatttgctaagtaaactttttgcacttctaattcacttaagatatttgttaaaacttgaataaaactcggtacaccattttcaatggccacatcaatcttcttcgtaccagctggtactggcatgccagcatccccaatacttaatgtatcgaaatgtcccatatctgaaataacgctcgaaatttgtgtgttaatcacctttgtttttctcatgtcaccaatctcccttatctttatttaataaatgctgtgacagaacctgccactaagactaataataaaccaaccattacggcgatcatttcttttttcgatttcttttcttttaagatgtaaatcccaccgattgtcgcaaagataacacttgtttgtgataaaacaaaaccagttgctaaaccgttgacagatggttgtgctgaaatcaagtaagttaatgccgcaaaagcgaagaagaacccactgaagatgttcttatatgaagttgcttctttaaatggtttataatcttttttagtttgtgttacgccgaagataatcccgacaattgtcatcccaatggcttgtggtaagaaaccttggaagccatcagcgctgactgcttgtggaaaggctgaataacctaagtaacctaattcaccgactaataataacaagacgcccttaacggcaccactcttgctagcacttgatttatcttcgctccaagcggtgagataaacgccgatgataattaatgcaatcgctgtaaaaccgattaattttgattgtgaacttgaccagttacctagaacgaagacaccccataaagatgccccaactaattgaaagccggttgtaatcggcattgttctagaaacgcccattgtttcgaaaacgtggaaagtaataatttgtgccagtgcccaacatgcacctgaaattaaacagaaaataaaagttttcgtttcaggaattggtgtcccacggaaaatggcaacgacaattgctagaattaatgtcccaatagttgtccccaggatttgactcgctggtttaccaccaattttaccaacaataactgggaaaatcccccagccaatcatcggcattaagccgattaagatatttacagcgttcattataatttcctccaagcctatttaatcaattagtaaaacgttttactaactatcttgatgattattataaatgacccatttcgataattcaaccctttttgaaaacgatttacatcctaaacataaaaaaagattaatcaggcaccgtttccgcccaattaatcttttttaaatttattttttcttagcttgtgaataaccgcgttttgacttataacctgcttctaaaatcatcagcatatcatcataatgtcgttgttgcgtctcttcagccttagcgccgtaaacatagcgcgcccattcccgttggtacccaggtgttaaggcgtcgaaaaaagttttcacggttggccgtgtctcaagtcgcgcacttaatcttggaatatcaacttcaaattcagataatggtttttgcgccatcttcaatcactccattattttaaccgcatcacatctctggcaatcattaattcttcgttcgtcggtacaattaaaactttgaccttagaatcatcagcactaataatccgttcttgactgcggacattatttttctcttcatccaattttacaccaaaacaagcaagctgtttacaaatatctgctcgtaattcgctcccgttttcaccactaccagccgtgaaaactaacgtatcaataccgttcattaaagcaacgtatgaacccacgtacttaacaacacgattgacaaaaatcgataatgccaacgctgattgtggccgtgtagcagccgtttcttccaaatcacgcatatctggtgaaagttctgaaatgcctaataaacctgatttgtgatttaaaatatcaatcatttcgggcatcgtaatttctaatttcttcgctaagaaagcgactagagaaacatcgatatcaccagaacgtgtccccatggtaatcccggcaagtggtgtaaagcccattgaagtatcaacggcatggccatcttggaccgcagtgattgaagccccgcttcctaaatgaagcgtgatcattttttgtgattctagcggtgtttctacgatttcagcggcacgatgggcaacgtaacggtgacttgtcccatgagcaccgtattttcttgcgccatatttttgataatattcttgtggaatactgtataaataattttcaggtgccaaggtactgtaaaaagaggtgtcaaaaaccgctacttgtggtacacctggcaataaggttgtaaagattttgatgtaataggcctgtgttggattatgcaatggtgcatattctgccaaacgattaatttcatccaatgccactggattaatgaccattgagtcactgaaagcttcaccgcccccaacaactcgatggccaacacccgtaacttcatccaaatgactgacaattcctaattccttcaagcgagtgagtaggagtgttgctgccatttcatgagtggtcacatcttggacttctttaaatttttgattgtcaccatatttagcggtaaacactgaatcagataaccctaagcgatcaatcatccctttggcgataactgtttcactgggcatttcaaataattgccattttaatgttgaactgcccgcgttaattgctagaattttttccatgttatcgtctcccaatctataagtaattccttcatgccacaattgtaagcaatttcataagaagttacaagcattgatttaataacacataaaaagggaccacccaccaaaaatgaatttagcggctgatccctatcgtttttattattttgcgagtttgtcgtctgattggatattttgaaccttttccaagaatgaacgccccattttgttatcttggtagttacttggttcaataacatctaaatagaattgatcaataaattgaattaaaccatcgattttttcacgacccatttgtgtttcgatttcttgatacttttgtacataacggctcactaaacaatctaaaacatcttgaccttgtttggttaaacttaagaatttaacccgttgatctgattgtaagtgttcttcaacaacgtagccgttttctttaagtaaacgacattgacgtgagattgcagaacgactaacactcattgttttagctaatttgctacccgttaaatcgtcattagtggcgatttcgtacatgatcaagaattgatcaaatgacactttgtagttcaaactttccccactgacaaaatcgctaagattgctgataacccaacgatagataagcgatagatgggtgataacttcccagtcttcagaatacttccccgtaatctttgatgacataattgaatctcctttttataaatacaagtgatgagggtcgaaaataattaatggttttaatttgattgctaacaaccatagtagcatattctttcaaaaaagaaaccacctgttttcattaatttagtacaaagtcacttaatgattaacaattatattgtaacgttaattattgcaaggataactatctgcaacttttttattaaaatttctattattttggcgttattgtaaaaaaagagcaaactactaactatcgttagtagttcactcctttcaaacctattatagattgcgatccatattgaatgtcaatttagataaattaattcctgacatgacgagttcgccaatcatgcccatggccttatctttcatcgtgttaacaatcaaataattttgttctgtcaaatattttgttagtgcttcgccttgataattcttagcttcttcttcaatactatccaacattgtccgtaattcttgtttacagcttgttagatagtcaacgttaccttgaatatgttggctatagtgaccttcaaccaagactgaaattgtccggtacatccaataagcactattaatatcccatttcattggtgtttcactgaagctaggatctgtatcattggcatttgtaaagaagggaataaatggtgtgtaagttggcatccctaaagtaatccacataatcgcagcttgttctttaggcacatcgttgcgcaattgtaagatatgcgcattttgtgttctgtttaagccaattggacggtaacgatacttgtcagcatcagcgccgtgacccattggatcgaattctgtttcgttataatgtgaaccaagtaacatttcaatgtcttcaacactaatcttatgttcaatcttgcgaatgaaaggtagatcagctgattcaggtgacatgtcaaattctgaatcaaataagtgatgtgcgtaccagacacgaggtgtattgtagtggcgatctttttcgttcattgtgccgaagatatgacggaagttccagcccgtcttatctggatttaagtgatgtttttcaacatattcttgaatcccttcagcccacatgaagttatccttatcgctgaaatcaacttgttgaatcgccacttggtttgccgctacggcatacccatcatctggaattcgttgtgctaaccaaagatgaccagtaacaatttccatataccaaacttcatcatgatcactaaacaagacactgttgcccgcaggtgaaccgtattgtttgatcaagttaccgaggtagctgaccccttcacgtgctgagttaatgtagggtgcgaccattgcttgcatacaatcttcgtctaagccgtctttaaccaatggatcgtaggctaatgacttttcgttgccatacgtactttcagtacaactcatcgcaacgttaacttcattaatactactttcgtcataataacctttgttcttgtaatccacattgggcaccgctggccagcgataaccgtcttctggtaaagtcgcttcaaaaccgttcaaccaagatttaattttttcacccttacggcctttaactgccggattcatatagaaacgttggggggttaagggcataaaagtatcatcattgcgggcaatcattgtcgagccgtcaagtgatgcttttttaccaactaaaattgttgtacaagctgattccatgtctatcgctccttttgatttagagaacattaaattattctcataaagatactattagtgtacgcccgccttggtcgaatgtatacccatattcataagattctctaaaacaatcatcaactcacttaaaaattagagtttcttcattaatttatgtttgagcaatcttttcatgatatattatagattaagtatcctaacaataaggtggtttcaaaatgaaaaaattaacacacgttctgttgatgctcatggctagttgtttcgtgattctagccggttgtcagaataaaacgacggtccctgccgccgcaactaagactgaggatcaaatcgagcagtatgttcaaaaggtcaaccaactttacgctgatgccgatcataaaaagcccgcaaaattaaccgctaacaagaaaaacgagattatcgaatcagcccaaaaattagatcataaaatttcagataatctctatatgagtgccctatccagtaaatcaaaaaccgcttttaaagcggctcaaaaagatttaaaacgaattgatactggcgctcccgtcgaaaaaactaagaaaaaaactaaaaagaccaaagatagcgatttcttcgatgccgatgggattgtcaaagatggcttgcaacttggtgcagaatcagattatgccaatgatgccaaaaaattagccgcctataaagaggctaaggcccaacaagcagcaatgaccgctgttgataacctctttaccaacagcgaccacacggcaattcccgccactttaacaactgaagatttcacctactctaaagcgcttgttgaaaaaacaactcacaagaaatttaaagaacgctacttaaaactgatcaaggaagctaaggcccagtttgatagttatagcgctagtgcctcatcaacggctactagccaaagtagctcagcaactgacacaacaactactgatcaaacaacgcaatcaactgataatacagtcgataacacggctgctacaaccaaccaaacgacaactaacaacaattatacgcaaccaacaagttattcaaacactacgccgcaaagtacctcatcaagtagtaataccggcaataacaatggtaatgtgactacaaataataacacttccgatactcaatcagagtcatcgacaagcgataaccagatttcaacccaatcacaatctgatgctttgttacaataatttaatctagctgtaacataaatagaggctattgaaatatttcaatagcctctattttttagtaaaatacgaacattatttataaaagatcgttattaaacgctacctttttaacataatctgccaattagtcttttaaatcctgacatcttaagaaacttgtaacaccgtgctaactattatgtaacatgtttgtcacgttagaatgatatgcttattgggtacgataaattaaaacaaacttaaacgtctaaaaacaaacttcaaaggagcacttcaatcacaatgaaaaaacaaaaaatgacttatttatcatctggtatcgttggtttagctggtcttgcattaatgggtatccaagctaatgaagctcaagctgctactacagggacagttaactacgcagacggtgctacaactatttggacaagtcctgaagttggtcaaaaacctacacgttacttaacaaacaaccaaaacgttacaatcaaaaatacaaaacaagtttacggtcaaacatggtatcaattagctgataacgaatgggttgccggcgaattcgtcaaaacaggtgaaacaacaccagcagctacaactgctgctcctgctgctaaagacacgatcacagttaactacaagtctggtgcaacaacaatctggacaaacacaactgctgctcaaccaactggcgcttacttaacttatggtaaggcacaaaacgtcattgcttctaaaacagctaacggcgttacatggtatcaattagaaaacaaaggttgggtaccttctagctacgttgttttaaacaaccctagtttagccggcgtcacaccgattactgatgccccagctgttacaccagttgcaacaacaactgctacaacaccagcagcttcaacaaccacgacaacacctgctgctacaactgcaacttctgaatcagctgctcaaacatcaacaacccaaccagcacctgctgcttcacaatcatcaacaacacctactgcacctgctcaacaacaatcatcagttgcaacttcaacatcaacaagccaagcaactcaagttcaaacacaaactcaaacatcacaaactagcacttcagtagcacctgttgcacaatcagcttcaacacaacaaagtgctcctgctcaacaacaatcaacaactcaaacacaaaacacaacaaacacagcttcaagctcaaacaccacaacagcaacaacacctacacaatcaacaaacacaaacaactcaactgctacaagcggtaacgcacaatcagttgttagtgctgcattatcacaaatcggtacaccttatgtatggggtggctcaacacctggtgttggtcttgactgttctggtttagtacaatatgcatactcacgtgctggcgtttcattgggccgtatcacaactgctcaagaaggtgctggtcaacgcgtatcacttaacagcttacaacctggcgatatcattttctggggtggcgctggtgcatcataccatgatgctatctacatcggtggtggccaatacgttcacgcaccacaacctggcgaatcagttaagattggtacaatctcaagttacttcatgccttcattcgcagtacgcgtattctaattacaatcgaatcgtaaataaaaaaccgctaattaattttagcggtttttttgatgcactcagattgacttataaattgactacctttcccatactttcatccacatctacaaaataacggttagaattacgactatcataataaacaattacttttttatctgacagaaacgatattggattccatcttaataaaccactcttaaaaataagattttcgccagtcatattttgatacgtacaaaccagatacctggcgggctgattgttgattctaacctgtgaaggtgcataatcaatgacctcggccataactttttcgcctgattgcttcaacatgcctattaatttcgcccggtgtctacttcgaccaattataatcagcgcggttattagaaatagaccacccaaacctcccatgatacctaaaaaaagtaaccgcattttagtcacattttcaatggtatatggttgctcaacaccattgattgttatatggaattgcgcctctcctattggaatcagttgtatcagcattcctatggttactaaaatcacccccgctgttaacgctaaataacctaaccatttaaaattataaaaaatctgcttttgcttatgtctgaacatactactgtcttccattactaatatctgactttattatacctaatgatccaacggttaccttcacatatcaaacaaaaaataccatttattttatcggatttatgccaaattaaaagaccatccgaaagccacttttacaagtcggtttcagatggtcttttaaaattattttgataattcattataattattttgctgatttacgttccttcaagaagttcaatacagctgttgtttcagcattacgttttttagcattcttttggttgataggacgacggttaccagaaacactaacatgtaagttttgtgacatttcgcatttcctcctttcatgcatatattctattattctaatctgaattcacttttttttcaagtaatgtttaagcctttggtaactttctaaaatggttcaataaccaactggtgataggaacggttgctatcacgccaattaccccgattagcaacgttaatatctcaccaattaaaattttatgatttaatattttagcgagcggataacctaattgaatgaaccaaatcgtcaatgataggaagcttccgaagaaactaaagaacagtgtattgaaggctgtcgcaataattttctcaccaatcgcgattcccgctttaaacaaaggtgccggtgccatctgttcatcatattccaaaatttcaaccaacccactagcaaccgcaatgctggtttctgcgattgcgcctaaactggctaaaaccgtcatgatcatgccaacttgcggaaatgataacccgattgccagaccaaagccttcaatctcttcagcatcctccgcgccaaagccataggttgctgcccagtggctaatcggcacaatgataactaacaatgccagcactactaataacgacgtcacaaacgctgtcttagccgttaaaggttgcttcgtattcatgaagatcgatgtcgccaacaagatcagactcaatagcccactgaccactaagggattaaagccaccagcaattaagaccagcgctaaaatgataacgacgaagttcaacccaaggctgaaaaagatggttaagccttgccaaccacacactagtattaatagtagtaataaaacacccgttaataacatcataagcggcgcacctccactaactggcttgccaacaagcttgtcaccggcacggccaaggtaatgccgattgcgctaatcacggtttgtgtgaagcccaaggtcatcgtgcgcgatagtgtataggcaattgtattcccgtttctcagatacaataaaataatcggaaaagcttctgccataacaatgaagaacaagacgttaacgagtggcccaataatttctcgaccaatcgctaaccccgagttaaagagttgtcgtctcgtcacattgggctgttcaaaggctaactgttgcagtgacgatgaaatatcggttgcttcatccatcacagcgcctaagatccccagcacgacttccgccaagaaaaccgtcttgtagggttggagctcataatccattgtttcgtaatggagtccttggtcgccactgatttttagcaggataacgctcaacagtaacgccaagaacgtagccccaattgtcgcaccaaatgataccaacatttgccgattcggtccgagtaccaacaataacgtcagaccagttaaaactacggcgagtccacacatcagcggcaataaccaacgaccaccagttgcagcgttaaagtggagcgtgataatgaagaacgcaaggtttacgacaacacttaagatggtcatcaggccgcgcttaggcatcatcacaagcaataagctaaaggtccccaagatcacagctactagcactgtatcgcgcttaggttcgtttaagagccattgatggcggtcttgatcatggtgtaagaaaacttgctggccccgataataacgataactatcggccagagatttggaataggtattttggagctgaatcgtctgccctttgcgcttcgtattcaagaaccgccccgttactttttgttggatctcggtatcttgattctggtaatcatccgttgttttcgttttttggatcgttttgacagccgtcacttggatcaacggttgtttgtagcgcgtcgcatcgtggtatgttgctaaaaccccaatcatgcagatcaacaaaccacctagcgccagccataagcgtttatgtttcacagttgtcacctcaaattatattgtagcggtttgcctgttaatcaccaaacgtttatcgcaaatttaatcaatcatttaaccgactgtgttttaacccgtaactgaagtaaatgattaagcccaaaatgaaccagatccccgctgccatccaagtaactgccggtaattcgaataacatgaataaacaaagtaagcctgataatagtggtaaccaaggatatagcggtactttgaaaccgtctttattcggaatatcctttcttttacgcaatggaatcaccccaatagacatgaagaaaaaggcaattaacgtcccaatattgaccagattcgtcaattgatctaatgaaacgagcccccctagtgtcgcgataatgactgtcaccacccggacactgttgattggtgtttggtggcgtgtttcaattttaccgagcatcttaggtaacaaaccatcccgaccgattgaataaactaaccgcgaactactgtaagtcatcgtcaacatcattgtgaacatcccagccaaagcaccgagtgataataagcccgcaaaccagttttgatgcacgacttgtaaggcaaaggcgactggattagccacgtttaattcacgatatgacaccatcccggtcaaaacaaaagcaactaaaatatataataacgtacaaattactaaggtcccgataatcccaattggtaaattcttttgtggattttttacttcggccgctgaagcagagacacaatcaaagcctaaataagcgaagaatactaatgacgcacctttgaagaccccactaacaccaaacggcatgaatggttgccaattagacgactttacataaaaaatgccgacgactaagaatagtagcacaacgccgattttaatcatcaccatcaaattattgatgcgtgtcgatgaacgcgtcccagacattaataacactgaaatgagcgtcacaattaagactgcaaataaattgatataagtgccatgcgcgggatcaaatgagcctgtaatcgccttaggaatatgcacgccgaagccttcaatgaaggacacgaagtatgcagaccaaccggttgaaacggccgcgactgataacatgtattccaagaataatgcccaacctaacaaccaaccaatcagttctccaaaaataatattgccgtaagaatacgcactccccgcgactggcaacgctgatgaaaattcagcgtaacacattgcggccactgcacagaccactgccgcaatcataaatgacaacgtaatggccgggccactgtgtaacgcggcaatcgtgcctggtaaaataaaaatcccagtcccaataacagcccccacgcctaacgcaattaaatccttcgccgttagtgttttagctaaacgttgatcttgttgaagataacgctcaagtgactcttttctgaataatcttgtccctagacccatctgcaaaacgccctctcgatgctttatttggtgatgctaaacgtgttctgtaacccatattcttccggttaaccctgagaatataaccagggttacggcacactctggttttaaacgtgctttttgaaactgacttctgcgcttagcgtcactcgtcgaataactgcttacagcagttattcgacgagctgtgctaatgctcaaaatcaacccgtttcaaacgcactctttttcttgtcgtgttctataatccggatatatcgcactttttttctaataacaaaaaaaggagcccactagtcttcactagtgagctccaccaggaagatgactcgggttacccagtcatcttccagtttattaaggtttatcatgtaatagacaatctcttcccttaatcaaccagtcgaattctgggtttcttaaagaaaaagttaaaggcaactcgttgcattgtcatcatgataaaacctccttgttattattaatttctaagtatagccaagcccatcgaaattgtaaagccttttttaagcagttgttttttcaaaaggaatctgctagaatttaaaacaacttattcaaaggatgtgactggcattgaaaattgcaggctaaatttctgacaactcgattggtactaaatggccccacgtttggggaccgtttatttctgattgtcgttagagctagcttgcgtttattttcaaggccggtaaaaaaaccagacttgttaacagacgcccatagtagcgtctttttttgtgcatacaaaacgacaaccaaccaatctcatttaaatttatgaggtgatattaatgggcacaatccaattcaaacaattaacattcaactatccagatcaagcaactccccttttcaaagacgtcacacttcaattcgatgccagctggcgcttaggcctaattggtcgcaacggccggggcaaaacgacgctgttaaaactacttcaacgccaattagaatttgacggacaactgaaaacagatctagattttcactatttcccacaaaccgtagccgatcccagtcaattggcccgcgacgttctaatgacgctcggtcaattagatgacagcaccttttggcagattgaacgagaactcaatttactcaaagttgatctcgactgtctctggcaaccattcaatacgctgagtcctggcgaacaaaccaaggcgctcttggcgttattattcatcgacgagcaccattttcaactcatcgatgaaccaaccaatcatctcgatcaagatggtcgcgataccgtggcacactatttacaacaaaaaacaggtttcatcgtcatcagccatgaccggcactttttaaaccaagttatcgatcacgttttatcaatcaaccgggcggatattaccgtccaacaaggcgattatcaaacctggcagaccactcaggaacaacaaacccaatccgaacagcatcaaaacagcctgctcaaaagtgaaatcaagcggttgaatcaaacggcccaacaaaaatctcagtggtcccaacaggctgaacgtggtaaaaatgcgggtagtgtcaaaaatgaaagtgccaatctcgataagggcttcattggacaccgcgccgctaaggtaatgaagcgcgccacaacgattactgctcgtagtgaacaagcggctactgaaaaacaaggtctgctcaaaaacgttgaaattaccgcaccactgacgattaacaatcagtctttaaagccgcaacaaatcgtcctaaccgcaaccgacctagtacttgaacaagatggtcgcgccctaaatcagccgctatatttgaactaaaggccggccaacaagtcgcattaaccggcgctaacggtacgggaaaatcaacctttatcaaagccttactcgcacttcctgaaatgcagcatcaagtcagtgggcagttgaccattgcaccgcgaatcaaggtttcttaatttaccacaagattttgcgcagctcagtggctctctagctgactttgcagccgccaagcaggtatcactagaacaattactctcaactttacggaaactgggttttgagcgggaacaattcaaccaccggcttgaaacgatgagtatggggcaaaaacgtaaggccgccctcgctcgttcgctttgtgaagaagcccaattttatgtctgggacgaaccgttaaactacctagatgtcattacgcgcaaacaactccaaacattaattgtccaaacccgcccaacactcttgttcatcgaacatgaccgcgattttatcgacggtgtcgctagccaacgttatcaattgattccacgctaattaactaatacgtattatctgaataataagtcgtatttaagccatcagtattaaacgtcttattagtattgtctttaaagaacgccgtgtttaattgattcaattcagtctctgtgttacttaacgttttggtttgtaacccgagactctcacgaagtttgttagacgttgcttgcaatttatcggtcgcaatcacttgataagaactcccgttaatccaggcttctttcccgatgatttgaccactcgtaatgtcggtcccacattgatggtaattttcgattaacgtttttgtttgatcagccgttaaatcagtactgatgtgcttgcctaattttgtcattaaacctgataaatggaccaagtattggggcttttgaatcttatcagcgaccccgcgcaagacttcttgttggcgcaactgacgaccataatcaccacggggatcttggtatctcatccgtgtataaactagggcctgcttgccatttaaatggtggcggccctttttgattgtctgcccatcgaaactcacatcgatatttgttttaacatcaacgccatcgacgaaatcaaccagttctttgagcgcgcccatatcaatcgtgaccgaataatcgattggcacaccgataaattcactgacggtttttttagccatcttcgcttgccctagttcataggccgcgttaattttttgaacattcttagtcttgctgccaaccatttcggcgagcgaatcccgcggaattgaataaaccaaggttttcttagttttaggatttaacgtaaccaccatcatcgaatccgacagaccgcgatcgacacgcccatcagaccccgtatcagcccctaataataaaaatgagataggtttatcctgattaatccgattggaaacctgtttgttttgggttttaatcgcacgaattgcttggttttcttttattttgtaaaaacccccaccaattactaaaataaccccgataacccctagtacaatctttaacttcttcaaaataacgactcctatctgtttactaatctcctattcgagtatattaaaaatcgctaaagatggtcgctttattaagccaacttaatactttttaggtttttttattattttagaatccaaaaaagttcccacctgattaaggatgggaacttttttgtttgtttaaacgtgcttttaacactagcttcttgcgcttagcaccgtattgcaaacaaccagccatgctggttattcacaacactcagctaatgctcagcatcaaaccgctttgaacgcactctttttttaacatgcttttataagacatggccctgcgtttagcgacaattggtgaacaatcgctttcagcgctcattcaccaatctatgctaatcctcagaccattatcgtcttataacacactcttttttaatctaatttcttttccaattcgctgacaatttctgcgtgttttgcttctgttaatttaatttttgccatgaagatcaaagcagaaacaattaataaagccattggtacgaagaacatgtatgtcttgaattgtaataaaccaccatttgtaatatcgcttggtttagcgttacctgtcatgcctgcgtgaattgcggcaatcccaacaacaccgttggcaaaggcaccagctaatttatccaataatgggcgaacggctaacgtaacagattcgttacgtgtcccactcttcaattgaccgtattcaacactatcagtaattgtcattaaagcggctaagaaaacaagtgggtatgggaagaagaataacccaacagcgattaagacaacaactaagttgctaccagcaaataagaagagaatgtagccgagcatcatcatggcaatcccgccaagatagatggcacgacggtgaatcaatgatactaacgttgggaataaggcaactgagataacccctaagatagcggtaatcacaccaactgttgagaaggctgcagcacgacccatgacgtatttgaagtagtaaattaaaagtgagtttgtgataacgtaactaaaagcaaataagaaatatgataatgataaccacattaattgatcatttttaccgattactttgaagacatcgcggaaacgaatcttttcagtattttcacggatagcactcttttcttctttagtaccgataatcgttgctaaagcgcctaagaatgaaacaacaccgatgacaacggcaaaccctaaccaaccagcgctagtttgttcgctaccatgcgtccctgaaaacatttgtgagaagaagacgacgattggcacaataacgatgattaccccttgggcccctaacgttgaaccaaaacgagcaatggccccaaacttcgtccgtttttctgaatcaacggttaaagcaggtaacattgaccaaaatgcaatatctttaaatgaatagaagatatccaagataacgaaaacgatcgcaaaaagaactaagtataaataagggctgtttgttgctaagccaccgaagttcgtgaagatcatgactaaaccaacagaactaatcaatgaaccaattagtaaccaaggtttaaatttcccccaacgagtccgggtattatcaactaccccaccgataagtggatcaaaggcgatttcaacaatccggatgacaaccatcatggaagtgacataaccgatcatttttgcattaaaagcggcattttttgtatcgaataattggctagtaacaaaaatcataaaataagtgctaagtgttgcatagaaagcatcgtggccaaatgccccgaatgcatatgaactatattgtttgatatcttttagttttttcattgttcaattcctttcatttgatttaaaactagtgataccggtgttcaataattttttctaaaatagcttggcgttgcttttccttggctgtgccaaactggttttcttctaatgaattaaaatcgtttgctaataaaacggattcaagatataacgtcaattgacgtttaatataaaccttgttgtcttcgtttgtttgcttcggatttccggcgataatggctgctgcaaattgatctgcatcgatggttaatttattatcattcattctaatagcctctttctaaaatagatttttagccggaaaccgtttaagcgtgatctctaatcgcggtgtaaacgcattcttcagctaacaaattcattttactaaacttttactaaaatgtaaacggttaatgataatttcattagtttgtttaaatttagtaccttgccaaaataaaaagggtttctcgaaagagaaaccctttttattagccttcaattaaggttaaaaatcgatccgcccaaatatcttcatagaaggcgattgtttgtgttgctgtcatcaatgaattagcaacggtcgtcgaaagtcctgaaaccatttgtaattgataacccagactgtgggctaccttgactgttgtatcaacgcaatactcagtttgcgcaccacaaatttctagtgaatggatttgcttttgttctaataaaacctgcatattggtttgccagaatgaattagcatgagtcttttgcacaaattgcgcatcagctggcacggataattctggcactagttgccaagcgtattgtggtgctaataaggttgtatcattatgctggacaaaaattattggtcgcttattcgctttataaatttcaattctagcattcacctgttcaatcaattgtttaaagttagcaaccggttgtttacctttgcaaaccccattttgtaaatcaatcactaataaacaatctgccaaatccaccatccataatcccacccaatactctttttaaaaaggataccattttataccactaaattttaggtgaatcgtatcataagctagtggttctactgatggctcatcccggcatggatcttatcgatattccatttcatcattgtgtaataggtatcgcccggttttcctttttgcgccaaggaatccgtaaagatttttgcataaattggcagtcccgtttcttgggcaactttagccatagatttcggtgataccgatgtttccacaaacaaactctgaacatctgttgccgcaattttggcaaggaccgatttcatttgggttggtgtcccttgcgattccgtattgatttcccagatataagttggggtcacgtcataagctgctccgaagtatttaaaagcaccttcagaagtcaccaacacgcgccgcttttctggaatatcagcaaattgcgtctgggcctttgcatgtaatttttctaagcgcgcaatatactgatccgcattttggcggtaataatcagcatttttaggatccttagcttgcaaggcaaccgttatattttcaacatactgcatgccattggccaaatccaaccacgcgtgtggatctggttcgtccttattggtcgttagatgttggaccttgatccctttagtcgtcgcaaaaacgtcttccccaaactttttatgtgcgattgacactaactttttaaaccaaccattaccacccgtttcaaggtttaaaccattatgaaataacacatcggcatcggttgccttggagatatcagttggttggggttcatattcatggggatcggtccctcgtttaacgatactgtacaattcgattcgatcctggccaacattggcgaccatatcttctaaaattgaattggtggtcacaactcgtaatttggtgtgctgactattagcttgtattttagcttgtgcccgttggtgaataaaaccgtacacaccaccaataatgccagcgacggttaataaagtaatgagtatttttttcatcgttgttgccctcccttagctgaacgccatttcaaaaagccttgtttaggcgcgcagataaacgaaactgcgaataaaaccgcagccattaagacaattgccgggccagacgcccaattgaaggtataactgaaatacagcccactaatcgccgcaacggcccctatgctagctgataaaaagagcattgtcacgagtttattagtccataagaaggccgtcgcagcaggtgtaattagcatcgccactaccagaataatcccgaccgtttgtaacgctgaaaccgttactaacgttaaaaccagcatcaaaccataatgtaagacctgcgttttgaggccgtaagttctggcgtaggtttcatcaaacgaggtaatcaataattccttatagaagaaagaaacaaataagatgacaatccctaacacaatcgcagttgtcataatatcctgatcactcactgctaaaatattaccgaataaaatatgatggagattcgttgcactttctgccatcgaaatcaggataaagcccaatgcgtaaaacgcactgaagacgaccccaatcgaagtatccgtcttaatcttactgtgggtcgcgacaaaaccaatcaagaccaccgctagaatgccgaatacggatgcgccaaccagcacgttgatccctaacatataggcaacggccacgccaggtaacacggcatgcgaaatcgcatcgcccatcaaggacatccctctcaaaataatgaaacttccgataacccccgacataatcccaaccataatggcggttaataatgcactttgtaaaaattcgtagcgccctaatgcgcccataaatgctgaaatactggtcattggtctacctcctgtttttcaaacaagacggccgataagtcggcactaaatgcgcgctcaatattctgggcattatacacttgatcagtcggaccataatctacgataccgtgattcataaccactaaatcgtcaaaatactgtgacaccttattcaaatcatgatgaataacaataatcgtcttccctgcatcccgccactgtttcataatggccatgattgccgtctcactttgtaaatcaatgccgacaaaaggttcatctaaaataatgatctccgcttcttgtacaattgcgcgggccacgaaaacccgttgcaattggccccctgataactggccaatttggcgacgttcaaaatcagcgagggccacctgttctagtgctgctcgactggccgctattgcctgcttgcctggatcgcgaaacaaacctaacttgccatacgtgcctgttaatacaacatcaaaaacgctgattggaaaatttaaatccaaatcttttcgctgttcaacgtatgcaacttgtttttggacagcccgcattgattttccttgatataaaactgagccttgctgtgctttaaccaaccctaatattgctttaatgagtgttgatttgcctgcaccgtttggtccaatgatgccagtgattttgcctgcgtcaaagtgaacggcaacatcagtaaatactggtgtgtcatcgtaagccacggtgaggttcttaactgttaacataaagagcctccattcttttaggtatacctaactttacatctatcagcataactgattttaacgcaattaacaaatattttagcctagtctaaaaatattaaagataacatttgatttaattaataattttttcacatgaattcactctaaatcccacactttcccctccaaaagcgctatactagtactaacaaatcgataaggagtgttttaataatgaaaaaaccaattaagggttcatgtacgacagtcttagtcggcaagaaagcttcaatcgacggttcaacaatgatttctagaaatgatgatggtcacgaagcgctagatcctcaacgttttgttgtcgtcaatccagaagaccaaccacgcgattaccaagccgtaatcagtggtgtgcaaatcaaattacctgataacccaatgcgttatacatcaattcctaactcactactcacaaacggcatctggccagctgctgggattaacagcgaaaacgtcacaatgtcagcaaccgaaacaattaccactaaccctcgtattcaaggattagacccactcgttgccggtggtatcggtgaagaagatatcgttactttagtcttaccttacatccacagtgctcaagaaggggttgaacgtttaggcgcgcttctcgaagaattcggcacgtacgaaccaaacgggattgctttttctgatcaagacagtgtttggtggctggaaacaatcggtggtcatcactgggctgctgttcgcatccctgatgatgcttacgtggttgcccctaaccgcatgaacatcaatcactttgtctttggctcagacaacacactttgttcagctgatttaaaagcgttaattgatgataatcacttaaacccagactttgaaggttacaacctccgtcacatttttggtagtgcaaccatcaaagataccgtttataacaaccctcgtacttggtatggtcaacaatatttcaaccccgaaattaaacaagatccaatggaccatgatttaccattcatctgccatgccaaccgtaaaatttcaatcgaagacgttaagtttgtcttgagcgcccactttgaaaatacggaatacgatccttacggtagcgcaccagaagacgttaaaacacgcttccgtcctatcgggattaaccggaaccacaatgtgcacattttacaagttcgtaacaacgtccctgctgaaatcgctggtattcactggttagcttacggtgctaataccttcaatacagttgtgccattttacgccaacgttaatgacacacctgaatcatacaagaatgcgacaggaacattcgaccttaacaatatgtactggttgagctgtacaacagccttacttggcgatacagactatgacttctacgttgatatgcgcaataccttcgaattagaagcaatgagcgcttatcacgaaatccaaaacgcaactgacaaagcctttgacggtcaaaaagatgccgttgccttcttggaagaagccaataacaaactagcaatagaatcactccaacgccaaacaaaactattaggcgaaatggtgatttcaggctcagaacacatgaaattacgttataacttgaatgactaattgttaaataaaaatgagcttcagacaaattactgtctgaagctcatttttttattttcttaatctatctgactcaacgtttcaaaaatttttgcagttgcctgtatttcttctattggatcaataagtgttgtcaacttagatttatagaatttatctatcttcttaacgacctcttctccagttggcgtcaatgaaattataacgacgcgctgatcttcgttaacaccactgcgttctttagctaagtaatcactataataaagttgcgttaattttcgactaaccgctgctcttgagatatgcaggtcttcactcaatattgttggcctgacacctcccgctgcagcaattcgtttcatcaaaacaaactgttcaaatgaaatatgatatgcctcacagggttcattgagcgctcttcttgtattatctagcatttgaactgcttcgtaaaatgctaatgtattcttactcacgtatgttcacctcacattcatcttaacctattgttatatttagtcatgttaacctattctgctaaaaaaggattctggataaccagaatcctttttgtatacaaacgatattatgaagcttgaacacctgtatataatgtccatgttaaatgagctgtatagatatcattaccaacttttgaatcttttggcaatgttaagttgatgtctgaacgatcccaaccaaagacgttagcgccttggccttcagaatcagcagcattagcaacttcaacttcttgacctttaccgtctaatgataatgaaacgttcttagcaattgttgaaacatctttgtcatcaattgttggatcagcttggaaatcactatcttgcgcttcatttgtcaatgtgaagacgtctgctgtctgaccataagcagtgtttttgagcaataagttagcgttattgattgtttcaccattattagttgctgttaaaacatcatctgatttaacttttaattgccatgtaccactttgttttgttgttttagcatcatcgccggtatcgttattttcacgtgtgatttgcttatcaacaactgtcgcccaggctttgcccttaacatctgctaatttagcatcgtttgtatttaaaacagctgtcatatttgtatccgtgttcttgtatgacgcatgacgatcattgctatcgatacttacgttatgaccagtagcatcaaatgttgggtattgtgataagaattctgtatggttaccaaaatctaatacgtgcggtaccatttgtaaacgtaagtagccagtattcccattatcagagttatcaccaaatgagatcccaacttctgtattaacagacattggtaattctgtaccaccattagcgttggcatcgtgttctactgtggcagcgaatgttgctgttggtgcaagaatgcttaagattgtgccggctgttaaagctgcacttgtcaattttgtgaatttcatttgaaattcctccctaggtttaatttgtgctttgtgcacgttttttatataacacacctatggtgccgttataacaagtttggatgggtacatctgtcaaccattcagttggtttgacggaatttttatggctgataatccaaaactaacgatcagcgcagccagtactgccttacattgttagtgtggtatacgtattaaaattgatataactcacaattgcgaaggctagactcaccagaaataagatggtcgtcagtgtggttagtgcaatgaacgtatatttaacggttgaatagtgatacttatcgattaatttattaatcattctttgactccctacttccatgtttccgaatataataaattaagataactcctaacacgacacacacgctaatgacaatgatggttaattgtcgttttttctgataggccacattatgatcattaatgtagcgcgcatccgttttagtaatttgaacagttttcttaatttcccgttgatactgatcactcttgaaatcagcaatcatcgtgtaacgacctggtaccaaacgcttcccgcctaacaacaagttggcgttgaaactcgaattcggtgcgatatgcatttttttcaaatccagcttgtaattgaaaaagcctaacttctgattggttaacttggttgataattgaccctttttgagaaaaatcggatcgggattattcactttaaactgtaaggctgcttttttatcaacaaatcccgtctgcatcgtaggcatttgtaaatgatgtaattctttgcgtggtaactttatcccatttaaagtaacgccaactgcatatacgtagcggttgctgatactgccacctgttggccccattgccgctaagttaatcgcgaacgcctttttgcctttaaaagcagtgtccggcatcttaacatttacattcacccatttttgggtattagcgggaacgactacttgtagtttaaaatggacatattgactccccggctctggcaaaagttgtttagaaaccggatcatccgataagtaatcaattcgaccatcgtctgcagtctgcgcatctttggcgctgactttaaccttaattggcttattcgttgggttaaagaccttaatttttaaagtcttctcagtatttggttttaatttaagattgaagtagccgagtttattccccccaagattatcctttggtatttctggataaatcataaatgtcactttctgtttagcatcagcagttgctgccgtcactagttgcggtgttgcctgtcgcattaatccccaaaaagcgagcattatggtgattattaagcatcgttttttcatgagcgtctcaatactttaatcaaaccggttattgacactagcattaagaccccactggcagttgccacataagcccacttattctttggctttttaagcgcttgtgcattaacggttttgacatcatcggccttaatcgtgaaactctttttgaagcgccaagtcaatggcaacttgttccagagattctgaccatggacaaccgtatcaatcgtgtatttccctggtttcaactgttcgtaatcccacgaaatcggtagggttaacactgagttaggggctacagattgattgctagtcgtataaacatgtttggaagaaaagagcccttctttagaaacaactgccttggcgctaaccttattaataaccattggttgcgtattacggatcttaatccccattgcagcatgacgccgataaatcatggcttctgttttgtcatatttcaattcagggtaaactttgtagtgttggcctttcagtgcaacgcccactgaataggcatagttactaccaactgatgattggccaccttttttatgaagatattcgataaaatgccaatccccataaatcatgccgtttgttcgatcttccggcattttgaccgtcattttaagaattttagtctcttgagctgccaatttaatggtctcgctctttttatctaatttagcaattttagtgaacggtactttcaagcttggatctaaccctttagtgttagcttgaaaactaacgccaccaccaacttgggtcatcgaatttctcaagtcggaatgaaccgtaatcgcgtgatccgtaaaattctgaatccgcatttcaatttttttagtttgaccttgcgccaaactcatgttgaagtaatttaaacttaaatcctcttgttcatccggcaagataggctgcacttcaaagtccgctttttgggtttgagcagcagcttggacctgtgtcatttgacagagcatcaagcccacaaacgccaagctcaatgccattaaacgtctaacaaatttcaatcgtacgcacctcgttttattattctgcgattactaatgaccaagttaattggcttgtatattgtcttgggaatcgttttgttgctttaggcactttcaaaccaatgctgtaatcagcctgttgggcatccccaaattgataagcccaaatcccaaagccatgtgcggcataataaccaggatcaggtgtcttattggtgtgcgtcattaaattaactgccgcgccttttggtgttaactcaaactcagaagttaccttagaaactggggcggttgcccctacgtcatcactttcttttaagacaatctgcccattatggaaatttaagacggcattatctaagaatttttgatctccagcaatcttttcattagcattggtatggaactgatcatcttgtttaacatttaaagtccaacccttagaggtgtagtaatcctcaacgctgacggcgtatggctgtttttgattgtctttagttttagcttttagataatagtttcggtcagtgccagtcgtatcatgtttaccaaaatcccagcgtttatcggcaataatgccaatgtgggattcttcatatcgataagtaatgacttgttcatctttggcgtaagtgacagtataatcatgagccaatgtccaatcaggtttcgtggttgagccccaatctggatctaccatattagaagaatcaaccacggtccaattgccgtctgtttctggaataactttgggttgcactagtctagtgttcccaattttgccatcaaaggtctcatcttcggccaacttgtggctttcatcttttcggtcccgatagcgaacaacaatccggcctttagactgtttaatatttaatttggctttttcagaagccccagctccaaaatcggtgtccagactaacactattattaatcactgatttattagtctcttttactttggctttgacataagcaatcgccataccttgacccgcaatcggaataccatgatccaagataacctggttatcagtccaatcagttgtttgcttcgcaataattttttcatctttgtccaaataatcaattctaacttgttgaatatcacctaagtcagcatcaaaaacatcctttaatattgcacccggtttaatatcgcctgaggcagtgttaacaatttgtatccgatattcaatctcatcgtcaacttcagccgttgtttctgtcatataatctgcgtcggacttcgttatatttttaacttccttaattagggttggtggtgtttttttgataacattgactttagcgacatttgatttaacatcagcaaccatagctatattattaataacggtctttttagtgtctttgagaatagtctcaaaagttaacaccacacttccatccgctgggatagcttttaaaattaattgattaccagtaaaggttaagtcttcgcttctcacctcactcccgtttgaatctttataactaacatgaacagcacttggttcatctagatcagaatcgagcggatcttcaataatggcctccggtacttcctcagaattagtgttagtgaaaactaatttataaccaatttcatcgccaatacttgcttctgtttcagtagcatacttcgcatctaatctagaaatattttttacttttttcgttaattctggtaattgtactttgataaacggtacatcgactatcgcacttgctgaacgttcttgttgattaacattactgtctataccaacaacattgacagtgttacgaacagttcgcccagaagctgtagttaaagccttcgcttcaaatgtgacactaacccactggttatctttaacactgttaggaaccgtaactttcaactctcgagttacttcattgtaagctgacggtgaaatggttatttcttgaccgctttgatttattaaccttattgaatttgtattaatttgaaattcggacggaataatatcactaaacgaaacatcactccaagaagaatccaatcccaaattatgagcacgtaatgtaaactttatattatcgcctggtctattactcccatcagcactagtttcattttgatattctttataagcttctggtgcaacgtcaggggctttagtaatccctatatcttgacgataatgttgtgattcaccaggggccaaggtagcaaacggccacttggctgtatatgaagtatcggaattttttaaaactgtgtaaccctcttctaaattcttttgttccaagcccgttccagaaaaattacgtggtgtgaacccatcaaaccaaggatttctcctagtccaagtttgtgccgcataattaattggtccatcaggaaccttcatattgatggccaatttatagggattttgagtgatatataatcctgcgttattgcccattgatgacatcggtactttatcattaccgtttaacattgtatcttgaccaataaaggtcccataagaaacggattgagttgtgtcatttttcaaataaagctcttgttgaaccgcagtagtacctgatagtgaaggccgcaatagaatttcagcaattaatgtcttcccattacgttcaaactgccccattattttgctaacaaggttaccctcgctgtcgtgcccgacaaaatatgccttatttgttaacttgttagctaagatagcttgtttaggtccatcattactttcatttggttcgaaaacaatcccaaaaccggttgatgttcttactgctttactactagtgtcttctcccttaaaaaaagcgccgattgttttattgttatctttaataaagatattaatctggctaccctgaatattgtagctagaaatttttgaatctgcttctgcgtcaattccgccattcacaccaccgaaggtataattaagaaatcgacttgtacttccttgaaaagccttacttccgacctctgtttttgtcttttgaacccaattaggaataccgtcatcaaaagtattgggattaattgctaatgcttttgatgttgggttatcaatcactttaacagtagctgtcttcgaaattaaatgatcagtttcggtagaagccgtaatatcgaccttcccaactgttgtcgcttttactagtagcgtaaaatctttctttatcggttcgttgctggaaatctttaaaatgttcttccctgtattctgattattttgtgattcaaagttaatacccccgttatcgctagatatttttatcggcgttagtattgctttattgccaagattaatatagagaggctcattgatttcactagcattaagatcaacttttaactggatggtatctccaacgatatattctgtttgatttagattaaaggttatttgaggtgtatcctccttcgacaaactagtttgtcgttgaacaccatctgttccaacgatatctttcagcaatagtggtttagattcatagtgaacgccattcattattgttgtcactttcaactgttgtttagcggatataccagtatcttttagtttaaaaactaataagtattcttttttgaacgttgttgcttgtctatttaccaaatcattctcaatattttcagctgtttgtgctgtttgttttaaaataacttgattggaattatttttttgatcaagggtagccgtatacgctgattttttgtttaattgattactagttgtgcgatcaaatgtggccccctctggtatagttagcgctaaatcacgttgcgcttttgactgatcgctcgctctaattacaatttgtttttcattagataattcctgatccgatgttaacgcaagatttgaatctactttgatactattttcagcaaggatcgttccggtagtaacaactagttgtatacccattactgctagtaacaccaaactgaacattatatttcgtctatttaaagtcacattttacccctcccgagaaatcattgacgatgataagaaactaaattgattgcatgtcattttatataatcgaatcaatgattcggtattgattaacagcgtttatactttcgatagataaataataatatattaactatctaccgaaagaccaataaataccacctttaggtggcacaacagagagtgtcataactcctgagttatgaacttattggtatgataaagtgctaaaactctactgccacgaacctatagaaatccttcaagaggttgatattagaaaataaatcaaaatgaattgataactcaaccgagtgtgtattattagtaaataatatttacaaagctagattaaataaaataaaaaaggagtgccgagtgataactactcggcactccttttttattcttgtctaatgttctttatcaattaattattgcattattattcttaatatagacaatctaggaattttttttatttctattgagaaattattagttgtagttaaccgttttttagtattttttgagcaagcactttcatttgacgattctcggttgaaagtcctatagtgactaggtaagttgcgcacaattattttctagtgtgttcctagtttttaaactattcttaggaggtcaaatattatgacaaatcaactaacgactaacgaagggcaaccatgggcggacaatcaacattcacaaactgccggccaacgcggtcccgtcttaatccaagattatcaattactcgaaaaactcgcccattttaaccgcgaacgcattcctgaacgagtggttcacgccaaaggtgctggcgctaaaggttatttcaaggtcacaaaagacatgagcgcctacaccaaagctgctgtcttcagtggcgtcggcaaaaaaacaccgcttatcactcgtttttctcaagtcgctggtgaagctggctatcccgatacataccgcgatgttcgtggtttcgccgttaaattctacacggaagaaggcaattacgatattgttggcaataatacgccggtcttcttcgtcaatgatccactaaaattccccgatttcattcattcacaaaaacgtgatcctcggacacatgcccgtagccaagatatgcaatgggatttctggtccctttcacccgaatctgtccatcaagttacgattctcatgagtgaccgcgggattcctgccagttaccgaatgatgcacggctttggtagccacaccttcaaatgggtcaacgcacaaggtgaacaattctgggttaaatatcatttcaaaacgaaccaaggcgttcataatctcagcaacgaactcgccgatgaactcgctggtaaggatactgattaccttcaaaacgatttattcgacgcaattgaaacgggcgattatcccagttggactgtcgccgtccaactcgtcccttatgaagatggtttgaattatccccaagatatttttgatgttaccaaggttatttcacaaaaggattatccattaatcgaaatcggtcaaatggtcctcgatgaaaatccaacgaataacttcgaagatatcgaagaattggccttctcaccagctaacttagtccctggaattgaagcatcaccggacaaattactccaaggtcgactatttggttataaggatgcggaacgttaccgacttggtgccaactacgaacaactgccaatcaaccgaccaaaagtccctgttcataattacgaacgtgacggtgtcatggcccaaaaccaagaaacgggcgttaactacgaaccaaatagtcaagatggacccactgaagtcccagcagctaagattcatagtgatcaactctctggtacaactggcaacttctctaccgatcccgattattactcagcagctggcaaactttatcggctactatccgctgatgaacaaacccgtttaatcgaaaatattcgcatgaatcttggtcaagtaactaaaccagaaattcaaattcgcgaagttaaacaattttaccaagctgatccagaatacggtcgacgcgccgcaaccgcattaaatttagatttagcacagtttgaataacgccgagcacaaaaaaataggtggtcccattgaggaccacctattttttattcgttatctttattatcttttttacctgcttcttgttttgctgcccattctttcttagtcaacaagtcagaaacattcattttaatttttgtaacatttaaaccggtcatcttatgcacagacttggcaatttgatcggttgtttgttcaaaaatatctggggctgatttaccgtattccaaaatggcatctaattcgattgtcacttcttgatcgtcaatatctgcatcaacacctttagttggatctgcttcatctctgaaacgatctgctaattgactcatcataccacctgataattctaagacaccatcgatatcatgaacagtttgaccggcaattttttcaatcacaccgtctgaaaagtttaattctttttcaatttgtgcgttatgatttggtgtttccttattaggtttgtccatcatcttatccattggtttgtttggcttatccattattttaatccccttttcttaattttttattgaactcttttgtcgtcgttatcgctctttttagcgttgctaccttgttgttgccattctttcttagtcataacgtcactaacatgactattgacctcaacaacactcaatcccgtcattgattcaacagcttcggtgacagccgacgttaagcgttcaaatacgtcgcgcgcgttgcgaccatattccaaaataatagtcatatcaatcgccacttgtttttcgccgacttcaacactgatgcctttggtaggatcgctatcagttctgaatcgatcagcgatatcgctgaaaaagttgccattcattgatagtaacccatcaatattttgtgctgttttaccagcaatttttgcaatgacagcatcttcgaacgttaacttgctgtttgctaatacgtcatctaaatgtgcttgttctaccattttgctgcacctccattatttatcttgtcttaatacgcggttgacttgtgctctaaaaccttctaaatcatctttggatcccgttaaacttgctgcaatgtagccaatcagaccggcaatcaaaattaaaattaggctcacaaatccaaagccaatccatattgccgctaatgcagcgcctgcaataaagccccaataagaacgtttcatttgtttcacctcaaatcactttactttgcgtccgaccttgatcatgaacaagtggcgcaagcttaacatttactgatttaattggcatgtcaaagacctctttgagtgcctgttgtgctgtttccttcaccgctctggcttgctgatcaatgtcccgattatcaagcacttttgcttgaatatctgcactaacccttggttgtcgacctttaaaaacggtctggacataaacatccttcaaacggtgtttttcaattattgcctgggaaattgttttttcaaccgctttacgcgataaagctaattccccttgattggttttaataatcatctgacgtttctttggcaaactaaaaattgctagtaataataaataaagaaaaaccagaccactaataacgcccaatcccagccctatattgctaatccactcttctgacagccagttaaagttaatggcttgttgatctgctagtcctagcggataaacgagcaaaatgaaccatgctacctgacataatcccagaaaactggctaagccgattaccgtttttgtcaatttattcatggtatctgctcctttactttaggatttcttacgtgaaaatagcattgatactaagaatacgatgattacggcacctaagattgaaggtactagcgccatacctgctagttggggtccccaactaccaaataatgattgacctaaccaggcaccgacaaggccccctacaatattgccaatccaaccagcgggtaaatcacgacttgtaatagcccccgcaataataccaattaaagccccaataattaaaacccataaccaatgtaacataataatcatccttccatactatttattataatcgatattccatcgactacttgtactacctaagtgtaacaagttcaacattgttttgtaaaagtatacgcttattcattttataaataatataagcaaataaattgacaatttagttgattgattcgccaccggtcaccccgtatatctgtccggtaatgtagctagcagcattgctagctaaaaatacatagactggagcgacttcaactggctggcctgctctttttaaaagtgtattctgtccaaattttggtaatgcgccctctaactggccttgcgctaattgaagtggcgtccagattgggcccggcgcgacaccattaacgcgaatccctttatctgctaattgttgggcgagattaatcgtaaaattcctaatagcggctttagttgcggcatagtctaagagttgtgagcttggattgaatccttggatcgaggtggttgtcagaatactaccaccagctgggatatgggcaatcgccgctttagcaatgccatacattgccaccacgttaatttcaaaactatcccgtacttgttggatgggtaagtcttcaagcgttggatgggcaatctgttgggcggcattcaacacaactgtatctaaaccacctaattgtgccactgcttgtgctaccacttgttgcggtgcttcttgcattttataatcagccgggattaaaactgccttacgaccagctgattcaattaaccccgcgacttcattagcatcactttcttcaccaggtaaatactgtaaagcaatatccgcaccttcacgtgaaaatgcaattgctactgcgcggccaattcctgaatcgccacctgtaatcaggactttgcgattcatcaattgctcacgcccttgataatctgcctcaccgcaatcgggtttcggccgcattttgccttgtagtgccggagctggttgttcttgctcctcaaatccggatactttatataactcacgtgggtctttcaaatctgctttgaccattaatatcacctttcctgacttaatttagataggttgctcttaactgattaatatcacttttacttaattttaaagcggtctgtaaataattctgcgtagaaccccaattttgcttaatcgtagttgttgcggtgtctaaataagcggattgcacactcattaaagcgtgcgtactttttataaagccactggatgcgtgcttagccgctaatcgtgacatgcgttgggcaatatgttgttgcgaggcagtatttgttagtaaatagtcttggcgaataacaggttcaggaacgtttagcgcattcaaaagataatatgcagccatccccgttcgatctttaccacccgtacaatgaaacagcgttgcctgattatccgcagactgttggagtaatatttcaaaaaattgacgatacatcttaatcgagtgttcatcttgaactaattcttgatagaccttttgcatttgcatttggccaccaagtggattgtttgtatagcgctgatagagttccgcctcagttgttgtactttcggtttggtcttctttgaaaatagggacagatttatatttagcactaactggtactttatccggtgcttgttgtcgctcatctttggagcgtaaatcaatatccactgagacgttataactgtttaaaagcgctagatccttgggactaagatcagctaaattagctgttcgaagtaggcgttttgtttttagcgttttgccgtctaatgtttggtaaccccccaattctctgaagttatgcccgttttcaatcggtaaaattctcgaaaccatctactcgtcctctctgaataatcgctattactatcaactttatgacgcttcgttactgctgtatatagggtttaatcgtttggtttttaataacattgccaactcgatcgactgccaaaggcccccattttccttctagaagtgcttcgccattattcgcttttaagatggccaattctaaatcagtaacaccctctagaaaacaattcaattttgattcttgtttttcaatcatcaaactcaaatccggcgtcttaactgtacttctacctaatctcactttattaattggcacttctttcaacatagcaaacgtccttccataatttttttagtagcgctacagtttaactataaaatattgacttgacttttcgcaactattctgattgggttatatttagcataagcatttacctttacaaaacaatttcaagttgtttaaattaacttgtatcactattctaaaaggggttgatgattatcaaaacgattaatgttatgttcgcagcagataataattatgccgaccagcttttaatcgcgattaagtcgatattggcgcatattcctgctgagacaactgtccattttcttattctcgataatgaactcacaccacaaaccaagtgtttggtgcgacaaattaccaagcaatcacatcaggtcgattttattaaaataaatcaacaacttttaaaaaattgtcctgaaagtaaccatattaataaaacggcctactaccgcattcttgcgccccaaatactattacgcaaagggattagccgcgttttatacttagacgtcgatattcttgtccaaaccgacattacgccactttatgaaagccatttagggactaatattgttggcgcaattattgatcctgggcaagctctagcactaccacgactaggtgtttcccctgaaaaatcaggtaacatttattttaattccggcgtgatgttaattgacaccttccgttgggaagaaaatcaaattagtgaattaacgctacgttttatcaatcagcatcctgagagaattattttccacgatcaagacgctttgaatgccattttagccggtaaggttcaattattgcatcccgcttggaatgtacaaaattcactcatcttccgcaaacatcagccaattaatgccacttataaaaaactttttgacgaagctattgcgcaacctaaaatcgttcattttacaacgcacaataaaccttggaatacgttgaaaggacatccatttttagcgcaataccaagcgtatagtcaacaattaggcgcattaaaaaaagacagtattaacattgtctcagctgttaatgctgcctttattgaacccttggcgattttatatgcttcgattttgaatcacaatgacacacaacgccgctattctttctatgtgttagaagaccacttaactgaagcagacaaaataccattaaaacaggtggttgccgcttttaatgccgatttaacttttctcaaagttgatgaggctctcttggccaatatcgtagaaagtgatcggattttaaaatcagcttattatcggattttaatcccgcaagtgctaaacggcattgatcgcgcgctttatttagactgtgatgctctatgtaacgttaaccttgaacgcctttggaatattgatttaggcgagttcccgctagctgcggttgaagacgccgggttccatcagcgcctcgaaaaaatggccattaagtgtcacagtacgcgctatttcaactccggcatgatgttaatggatcttaagaaatggcgtcaacaagccatcactgagaaaactttagacttcattaaccatcatccagagaagttacgctttcatgatcaagatgcactgaatgctgttttacatgatcaatggctgcatctccatcctaaatggaatgcccaaaccaacatcatcatggataagaccacacccccacaacatttacaacaacaatttattgaagccaaaaaggccccagcaatcgtccacttctgtggtcacgagaagccttggcatgcagtatctacccacccattcaccccacaatatcgttactatcgccaccgcttcctcaaaccaaaacgccaagcgtctatcatccctttttcaaaaaacacacaaattagcttagagaattaatgctataaaaacccctgctaggtccaacctagtgggggttttgtgtgaattgcgcatcatgatcctctaacgttgacaaagtatcgccttaatggtttaataatttaaactaacgaacgattggagattttcaaatgccaaattacaaagcattacaacaagacttaaccgatgttagtcaatttttaattgccttaggtgacccaaagcgccaagccattatcatccgcttattagaggaaagtgattgtgacgggctacaagtcagcgaactcactgaagcaaccggcttatcgcgacccgcggtttcacaccatctcaaagtcctcaaggatgccaaactaatcgactatcgcgcagaaggcacgaagaatttttattacctcaatcacgacacaaccgaaattgtaaaactcaagcaatttctcgataaagtcacccaaattatgaccacccacaccaaataaggagcgttaattatgcaaacaattttaggcagtagcggtcaaatcggccaagaactcgcaaaagaactctacaaaaactatactcacgacatccgacttgtgagccgtaacccacggaaggttaatcctgaagatcaactctcccccgctaatctgctcaattttgaagaaaccaatcaggccgtcgcagggagcgaaattgtctatttcacagccggtttacctatgaattctgatatgtggaccgttcaatttccgattatgattgataatgtgattcgcgcctgtcaaatcaaccacagtaaattagttttcttcgataacacttatatgtacgctaaaaatgcgacaccgcaaaccgaaaacagtcccttccaaccagacggtcaaaaggcaactgctcgggcaaaaatggcgcaaaccgttattgatgctatgcaagcaggtcaaatagagactgttatttgccgcgcccctgaattttacggtcccgccaaaaccaatagtattaccaatacacttcttttcaacaaaatcaaagccgggcaaaaagcacgtattcccgttagcgatcaattcttgcgcacattaatttggacaccagatgctagccgcgccatggctttaattggcaacacccctgatgcttacggtcaaacatggcaccttccttgtgccgatagcattacttacaagggtttagttgaactgattcaagaaatcacgtaccaacctatatcctattcgattattaaaatgtggcaattcaaattagcaagtttcttcaatcaaaatagtcgcgaactacaagagctgctcccccgttatcaagccgacaacatcttcgtttcggataaattcaaaactcgcttccctgaatttaaaattacatcgtttgaagaaggcattcgagagatattgacggtttaaaaagtataatgttaaaaatagcgtcaccgaaaatatcggtggcgctattttgtatttatgactgattaattaattttaaatatcgatagatacttggttccgaggtgcctaatatctcagcaacttttgataaagcacctttaattttaaaaatacctttttcatttaattttcgacaaatttcaattttcttatcctgcgttaacttaatacctggctgcagtgtattgggtgctactaccgcataaatgatttcttcaacactcgaatggagcacttcttcatttgtaacgacttggcgttgctgttgatgttcgctagccactgtaggtactgatgccattaacgaatccagattagcaagattaataagattatcaaccgccgctaaatatggttgcgcattaaaattaatacataacaatcccaacaaaacaccctgatcatccttaatgaagtaagtagacccttgaatttgctggtttttatcactactagccttgtaattaaccacagcatcttgtttttgatatattttattcctaataagatctaacgcgaaaccagtgattggagaatttaaattacgtccgctaatttcagcattctcaatcgctgcaatatagtacgaatcatcttgattaatccagtgtaaaacaacttcataattactacctaaaacttgacctaaaaaatgaactaatccttgatatctctctaattcgctaaccatcagaaccatcctccattcacaatagcgttgttcttagtatcctttataatacttaatttcttgatagattacaaacatttattataataataaattattattgtaaaacgtattgctcagttgtatactttgtttataatacttgagaggatgattatacatgattaaaaatcggttattaattcttgataagcttaatatcagtgttgtttctattaccttcaagaagtggcgacactattctaaataatcactaactatttattaaattcaaaattaatgaaggagtgagcaatttggaaacaactacacaatcaacaccacatctttcgagatctcaaaagcatgctgataaggcaggcatgtctttaacggaatggcaggcggccactaagtttgacggcacagactggggctgggtttttatgagtattggtatggcaatcggtgccggcattgtttttttacctgttaaagtcggtttagttggcctctgggttttcctagtttcagctgtgattgcttatcctgctatgtatttattccaaaaattattcatcaataccttagccgaatctgaaaaatgcgaagactatcctagtgttatcagtggttatttgggtaaaacttggggcttcctactaggtgttctctactttttaatgctactaatctgggtatttgtttattccactgcgattacaaatgatagcgcttcatttttacattccttccatgttactaaaacagtctggtcaaataatccattttatgggttgattgttatttgtttgctcgtcgcaattgcttctcgtgccgaaaaattacttttcaaaatttcatcctttatggtttgtacgaaactaatcattgtctttgtcctcggcgttgtgatgatccaacattgggatcttagaaatgttgcagcatttcccgatttaggttacttaattaaacaaacaatcatcttgcttcctttcacactcacttctattttattcctccaatccttatcaccaatggttatttcgtttagatcccacaataaaaatattgaagtagcacgctataaatcaattcgtgctatgaatattgcctttttcacactatttttcgttgtcttcttctatgccatttcattcaatcttgctttaggtcatgaccaagcagttgaagcttacgagaagaacatctcgacactcgccattgctgctcagaatatgaacggtaattcaattaaaattctcagtttcattttaaatattttcgctgttatgacggccttctttggtgtctttcttggattccatgaagcctgtcagggaattgccgttaatattttacatcggattatgccaaagcataagattaacaaaaagaaccttagcttcggtattttaatcttcgctatcctagtttcttggagcgcaatcttactaaatgctcccgttttaagttttacatcattatgttcaccaattttcggaatgattggttgtttaatccccgtctatcttgtctatcgtgttcccgctctcaataagctcaagggtcctagcctatatctcatcgtttttaccggtattctactgatgatttcaccgttcttagcattcatttaaaaaataaataaggagtgattattatgtctttacaatcaaaacatttcattcaagccctcaaaaatggtgtcgtgcccgctaccggttgtactgaaccgattgccgttgcctttggggccgcaacttgtatggcccaactgactaatcgcgagattcaagccattgaggtgcacgtttcaccaaacgtgatgaaaaatgccctagcggttatggtccctggtactggcgaacctggtttattagttgctgcggccgcgggggcaattgctggtgacgcgacggttggcctcagcgttattgaaggccttcgcgctacagacttaccaaccattctagacctcgctcattctggtaaagtgactgctaaaacagcacttgtccctgacgatttatatgttgaagtgaccattaaagatcttgaaaatacggtcaccgttgcgattgctggcagccataccaatatcttttctttaaaaaaagatgatcaaattttaattgaccacccccgtcccgcggcgcacgcgagctctgaatcaaaacaatttttacaaactatgaactttaaggctgtttgggattttgccatgaacgaaccattggaacaccttcgtttcatgaaagaggcgcacacccttaatttagcgcttgcccaagatggctttacgcacgactatggtcttcaactcggccaatcaattaatggtgccaaacgtaatcactttggttctggcactgaaaacgatcttggtaatcggatgattgcttacgcggcagcggcttccgatgcgcgcatgggtggtgcgcaattacctgcgatgtccaactctggttccggtaatcaaggcatcacagctaccattccggtcagcgtagcggcagatgccgttcaggcgactgaggaacagctgattcgggcacaagcattatcccatctcaccgccctatacattcactcatttttgcccgtcttatccgccttttgcgcgactgattcggccgcaatgggggccgcggctggtgtggtttatctctatgacggaacttacgaagatgcttgtcatgcgattcaaaacatggctggcgacgcggccgggatgatctgcgacggggccggctgtgcttgtgccatgaaagtcgccaccgccgtttcctcaatgtaccgcggcgttaacctcgccttgcaaggaattgttattccaaatagtaacggcattgtctgcccaacaatcgatgagacaattcacggcatcggacgtttaggcacagaaggccttcgggaaacagaccctgtgattttagatattatgttaaataaataaaagaaccgtcttgcgtgcctaatattggcattcaagacggttcttttattgtttaaattaaatcaattgcagctgttaaatctgccacttcatgttgcattacggttgttggtaaagcctgggcttgcttgcggttaacccaaatccgttgccaattcaggtgctgacaaggaatgatatcccaccaataaccggcagcaatatgcaaatgctcctcgttagtcaccattaattgatcagcaacttggccaaagaaattaagcgttggtttataacagtttaattgatcagaggtgtataaataatcaaattcaactgggatttgcgccaaattctgcttgagaattggtaacgaagcatccgtcataattcctaattgaatccccttagccttcattgttttcaaaaaatcgatgacttctgggaaaacttttaaattagcctgcaccgttaacatttgcgttaaatctgcattctcgtactcataattgaaatcatgcgcacaataccgcaaggcttgttcgatgacctgttcgtaaggcatgaaatattcgccatacatcattcgatcttcatacagctcaaaagctttttgaaaaagtccgcgatcaatctgatgttgcacgccaatttctcccgcagcctcataaaatggtgccgtatcaaccaacgtcccataacaatcaaaagtgattaattttatcatctgccaaccaacccttcagcctatcattttctaactaccccctattttaaaccactaatcctccaaccacaatcgcgttaactttcaaaataaaattgacaaaatgtcatcaactcattacaatttgaaagtaactagttcattacattatggaaggagttcgttacgtgattcaaaatcgcattaaagtcttacgcgctgagcgcaactggacccaggctgacctcgccgaacgaaccggcatttccaggcaagccgtgatttcaatcgaaaagtataaatatacaccctcattagaactcgcttttaagattgcgcaggtctttggggtcgaaataacaactgtcttttcaccagaggaggattcaaaatgaagcaactcatcatgttaattctgattatgctgttagcagttttcatctttttagatcttcacttcaaacacaataagtcgcgggcctaccagaacgatgaacgctggcaattaatcaccatcaaagccgctaaggtgatggctatttttcttgattcaatcgttattttactggcactggccatgacttatttcttactaactgatggtggtagtgaaatgatgaccatcagtgacgctgtcagcgatgctttttacatctacgcactcaagtatcccgttgaatattgcgcctaccgttactacgatcaagtcctataatattaaaacgttaattcgttatagaaaagagccccttattcatgtcatttacccaattgagttttacattaattctgattggcgtggcagccggcatcgttagtaccgtcggcggtctcgcatcactcgtttcatacccagccctactcgcacttgggttaccaccggtcacggccaatgtcaccaacaccgcgggcttaatcttcaccggcgttggcgcatcactggcttcacgcaaggaattgaaacaccaaaaacgggaactcatcacgcttttaccgttaaccttaattggctgtattgtgggggccttattactctttaaaattccagcagaaacattccaaaaaattgtgccctttttcattttatctgccggcattttaatcctcttaccacgccatctccaagttggtcaacccgctaaatggcaagttagcctcgcttggctcggtgttttcttagtcggcatttacagcggctacttcggtgctgcttctggtgtcttgatgctatcattgctctcagtcatcagccaagcgcctttccaagaatataacgccaccaaaaatctaacgatgggcctcgcgaactgtatcgcaacactagtctacgcgcttcaaacgaccatcaattggggccttgtcttgccccttggaatcggctttttgattggcggcctcattggcccaatcatcgtccgtctactaccagaacgcctaactaaaattgggattggcatcgccgcactaggactagcagttagtttatttatgcaaacctattaaaaaaagtctgtcatcatttagtatcccactaaatttatgacagactttttttgttaaaagagattacgacaacttattttttacggatataatgcttcaaaataatcgcaattgctaacacagttactagtaatagcgtctttttaaaatccgtcacaaatctaaaaataagcacgccaaatagtagtaaaactataatggtaattactaaatcaactattctcttcattgtatcccctctgctagttgttcttgcagccactccaaattaacttcgtggtgtcgttttgagttggccatcattttgataaacatcggttgtagattggttgcggtatttaatgccgcttcaatcgcttggattttttccttagtttgtgcaatttggctctgcaagagttcgcgcatttgcgttggttcaacttgatcagtgaatagtagtggtgtgtagaatgggaaagtaatcggcttattctgcccgccataatgggcgaactgtttttcaaaagccgcttctccccccgcagtcagcacatagcgatttttctcgcgcttatcactggcatcatccactattttttcaatcaattgcttttccgctagttgttgtaagttgtagtaaaaagaacccttcgtaaagttcaaaaagaattcgaaataattgttttccatatcagctaataattcgtagccataagcacctggctttttcttcaataaacccaaaattagaaactgaatcatttggcagtcccctcacccgttaactgcgcgatgaattctggatagctcatttggccaagtgcgaaagcacgactcaagcgatacatcttttcctgcggggtttctggtcgttgataaagtgcttctaattgagcagcttcatctggcagtactgcgaggacatcctcttggttggcaaaagcagcgtaataacgcaggccaaaacgccgttgtgaggccgcatcgatgtgaatgccatcagggttggccgttaattcggcggcgttgactaaataactatggggatcttgcgcaaccacgttcaccatttcccgattaatgtcattgaattctgtcgcgctagcaccgaacccttcttggcctaaaaaatctggtaattgcccgataataatgggtaagtttgcttgacccaatgcttggcgtaaatgactaaagaccgccgttaacttggcagcatatgtatgatagccaccttttagactgtcgctttccccctggtgccataaaacaccaattaactcgctagattcctgtgcgaatttggcttcagcaatcgcgtggcgcatcaacatttcgtcactcgcccactcatcgattgaactgcccccttcagcacacggaattaaacctaattcttcatccgggtgcgcctggacccaagccgccgcaaatgatgcagccggcccaacacccgcaacctcccgatcaaaatgaattggttcggccatcatctgccagcgcccattgcgtaacatcttcacgcgctcgtgccgcaataccggcacaccttgaataaatcctcgcccagccatatttgactgaccgactaataaaattgacttcatcataaaaatcctcctgaactgatttttatagcatagtctaattagactatgaatgtaaaaagttatttttaaataaaaaacgaacagttaagaattacttaactgttcgtttttaagaaaaagctataatccgattaatcaatgctcgattttttccactgttttactactactaaagttagaattatttacctctaattttactattttttctatttcaacaccaatctcttttacaagattaaccactaaagcattccccatagtgaaataccgatttggattacttacaccttcaagttttgtccaatcttttgggaatgtattaatcaactcagcttcctgtggtgaaataactctatatcttccatttccaggatcttctacaacgtgactcattctcgacactgtgtgttcagaagttaccatcgttctagctggtttattcaatggatcaggataggctatgctgcccatcccatacttatattcatatcctgtccgtgaaatcttagtagttcggaaagctcccttcaattcttcaaactttttctttttttcaggagtcagatacagttcctggttttcagcattaggttctattatatctgctaatgttctgggttctctaacaataggctcataatcagccatatatacagacccatcaatcattaaaccggttcgtcgaaaagctttttttaatttaaaattatctgaaaaatcagataaagattgatacttatataaatcaactttggttaatttacctaatgttttaatttttaatgtatttgagagtggtgccatacttttaataaactcggtaatttctgactcgtttttcccaataacttcttttgcatcaagtttaaccttagtatcttctctaaatgcaaaaataaaggttcttctacgccgttgtggaaacccataatctgccgcattaatcattttccaagacacaccgtaacctaagtcagataatgttctaagaatcatgccgaaatccctacctggctggtcactgttgacgccaggagatgttaataaccgatcaacattttcaagaaatataaattgtggccatttcgcctctataacttcttttatgtcccaccacaatacaccttttttgccgtaaaacccttttgctcctgatgatgcaacagaataatcttgacacggaaaacctcccactagtaaatccatattcggtattgcttgcttatttaccaaagaaatatcttcgttagtaacattagtatgcggaaaattatttttatatatattaaaggcaaattgatttgttctatccggttcatattgatccgcccatactatttcaaaattcttgcttgctcgtgttaatcctaaatgaaaaccacccacacctgcaaacatttctgcaaccttaattttcgaattactcatgcttttttgttatcctcttccgttcttcatcaataatcctaatagcatcttgtatttcattttcgctatattctattgacaatgtattatcatcaatagccccgtacataatttgctctttttcctttagccgcttatatattttctgatcgataaatcctggtcgatcactaaatacatcttcatctttcgtctgtaaataatagtaccgtgtatgttgttctggatcaagtcccaatctatgaattctatctcgagattgcaacataaatgttaaattgaaattatattcaaaataaacagcatcatgaacagtctgatgtaaagaaattgattcccctagcgtttgggggttagaaactaaaacttgaacatcgccatctctaaattcgttaattagtgaaactcgttctaacttatccgtttcgccataaactaaattaactttaattccttcttttctgagcgtactagttattttttgaattgtatctacgaaaatgccccacacaagcactttcttaccttctctaactagtcttgttactaactcaattccttttaaaaatttaggtgcttctatattactaatattctgataaataccacctttttggattttagtatcattttcatctaataatttatcaaaatcagctttcgaaactcctaccgtgtcgccgtcatcatcatacgccattaattcgtggtaattaatagtggtgtttaccaatgatggattagtggatgcttgtatcaaccgaattaatttagcaagacttgaagtttcattatagtaaatagactccgctaattctagttgctcctcactggctaagcattcctctataatatcatcatcagctgctggtacgttcagatccttcttattggttctccaaaagaaaggatgcatcgtttcattgatttcttcaatcattcgaatcttaggatttactaagtcgttcgcatcccagccaaaaaatgaactatattcattcccgtataatatatgcaagaagttatatacatctttatatgtatttggtattggcgtcccagttaatacatatttaaattgtggtatttgagctatttttaaagctttctccgcccgttttccattcggatttttaattcgatggacttcatcaaaaaccagcattgttttatcatcaactagtttctgtaattgatcagcataagattgaagcgcttcgtaatttatcagtactagattacttaccccccaatctgtattcaattggtatttaaaatccttagaatgttgagaatcaatcgaaattaattttttcttattaccaaaaacttctccaaactcacttttccaactatcaaatgcattaatcggcgaaataaccagtaaccgttcaattttttcacttggtaaggcgtctttgcgattgagaaaagcaaaaacccctaacaacattgccgtttttcccgcacccgggaccgaaaagttagcagcacgcgccatttcatattcatagtatgctgcccgtaaatgtaaatcgaataaaggtctagcaacttcagattgaacaatactcgaaaatttttcgaaagacacctttttattttgtgggaaattatctagttttcctttataaacttcacctagtattctgtattgttcaattgaatatttattccgcgaaataaatcgtttgacggcatcagaaacggttacattaatattctttctatctgctcgtttttcagtaacactaataattcgttcaatatctttgtaagttgttgttggtttaattgtttggttgtcagtctcaaagaaaaagctcaggtcactcccaatttttaacttacgatctatacttgttaacttatcttttgtggtatccaatcgaaccacagtatttccaaataattgaaaattgattgtattttcagatatctcgattgtatctggattatcttcaatcaattttatttccttaattgttgtctgattctggtactgtgcaatttcttcatacgttaaatctgatatttcaaccacttcaacatcttgttcactattattccagagccgattaaaccgatcaatattcgcctgcattcttttctgaacgtattcgctagaatcccacgatacgtccacactaatactttcgtaattcgtatttattccgctttgagtttcattcatagaaccgttaaagaaaacatggtcgccactagatgagataatcccaaatttatcatgaaaaatccctttgtttgttaaagctaccttaactcgagcacatccgtttgcaatcataaaggctaaatttccgagttgttgttgcgttttagccgttaattggccgttgcggtcagctatctttaaaggttttaatctatccagtaactcgtagccttctttaattcttaaataatcttcttgtgaaatttcctttgaaataataaattgaacttcgccgccgtttcttgcaagttcttctaatccatccacgtagagatctagtccagcactactaaagtaaccagaaactcgttgatataacgttgcctcctttagcaacggctggtaaaaatccgtcactaaaccctgtgtatattgtgattgtaacgtgtgttttataccttcagaaaacgtcatacttttaaatccttctttaatttatacaaaatatcggtaatatcccgtaataaatctttggcatttaaattttcttctacagtaaggtctgagaagctatctacacttatttcatctaaattatccataatatcttctaattcagaaattactcgtgttctctttttatccttcatccctttatgcactaaacgattcgtcgattgtgtaaacttctccactacttcttttagctcagagtcttgattgattgtttgcttcaactcattcgatgacataattggtttttctttaaaagcatcaataatatcatccactttatcatctactgcatccatataatgttctaaaatatctggttttttaagtacattatcttttaaatcacgtactattcgtgtcgcatcctgattttcattattagtctttgctactgctaactggactaaaactgcatcagtgatagcctctttatcagaacttttcaatttgtttatcgtaccctcaatttcttcaattggaccatctaacttcaagtcgcgagctaaaaagaatttattgactggttccccacccggagaaatgattccaataaatcttagaattaattcagcaaggcgaatgtctctgttaattccttttgtatttcctgctccagaagcttttttgtattcctctactgtcatcaattcttcaactttaattgtattataaacatcaaatattcgatcaatcggatcataattaattcgttcttctcgacccaattgtaaatctagttcaagttccttaatcgttttttcatcagttttcttagcagcatctaacggaagaataatcgcttcaaaagttttagctatattatcctcagattgatacattctcaatgcagtgaatctacgattgccatcaatcacccgaccatctggtaaaacgacacctggctcttgctgggttttgtcttttattgattgcaacgtatcttttaatgcattagcatttgatttgtaaataaaatcttcaaatatctcattatatttcgaattcccagcctctggaattaatactccatgttctgcttgatactgtttataggtcgtatttatccgtccgttctggtcattatagtaaaggtattctaaaggaatcgcgacaacttcatacggatcgttatttatttgacctgaaacagacatctttttagtaataccagttttttttaacttacgtgcagctaccatctctaataaattcatttacactacccccattagaataattttaacatatatgataaaattttttcataaactttatctcctaacactatactttctctagtttttttgatatttattttcgaaaaaatttaactctgctagattttacatgctattaacctgcttcaaattggaggacaccgtttttgactaataaacaaaagcaagattttatttattggtttgaattaaagaggctatcaacaagtactatagccaaatattcaaatcaggcgcataatcgaatttttaaagagttaaaaatatcattctacgaattaaaagtcttaactgatttacaggatcttttaattaaagtaaaaaggcttgaaaagcagatgcctaatgatcccaaaagaatgtattcttctgcagtttctaactatattaagtataaaattcattctgaaactcccgataatcatcatcaagatttagactatctaatagatgtggaagagactttagctagaaccacttcccttcctacacatatcgtcactcctcgggattctacaggattaattagcggcacaactaaccaattttcaagaaataaacgtgtaggtgctcatgcaattcagttagcaaattacacttgtcagattgattccaatcatcgactttttatatcacgtaaaactaaaaagaattatgtcgaagctcatcatttaattcctatcgcttatcaagctatgttcgaacatagtatcgatactattgaaaacatagtttctttatgttcatcttgccatcgaatggttcattttgggttagatacttctcgtattgaattacttgaacagttatataatagatttaaaaatcaattacgactggtaggtactcccattaaatttaaagatttacttgaactatatggaatagatcaaactctttattgattttaaaaaatatacccataacagaatttgttatgggtatattttttactctactactccttctttgtacactgtttaaaccagcggattttcatccatcgctggtaaatatctgcctaccaatccggcaatcagcgttaagaagccaacgctaatcagaccagccaagtgaatcaactggctggtggtgtccgacattgcgacactgccactgatttgagcaatcacggtcgtcatgtcttgttgccgcattacggctaagcccatcaagccaataatcaagataaattgcatcaggatactaccgagatacgtattccgatatttaacgattaaggtttgcgcgggcgttgtgacgccggtgtaataagcgcggtgatttaaaagaatgctgttggcactgccaaagaaactaatcaataagatgcctaataaaattagatgcggcgtaatcatcaaccaagcccccaccacaaaacccaacagttggacttttaaatctgataacttcgaaaagcgcctttgtacgctctttcgaataacttgggctaaaatcatccccgcaccgtaagtgacgtaagcccctatcatcaatccttggttttggatcgcgacaaaaatatagagcattaaaaacgtttcaaacgccccgttaattaaggccgcaatcaagagccaacccgacatctgcgttttagtaccacgcatgataattacccgcaagactagcgcgactaaaccaatgacagcaatggtgattaataaccagacaaatttggcttcaaaaaggcgcagatagctcagcgcaaaagccatcgcggttgcccagacaaatagttccaagttattaagtgatttggtttgtgcgacaaatactgattcatcaagttgcttcacaaatggttcgaagcgttgcatcccgacaaaaccaatcaatacaaatagcatgatgacgataaagatgaaccgatatgaaaaatgactagcgatggtcaatagaccaactgttactaagctaaaagccaataacgttttaatctcggtccccatcagatgccatttccagactacccgctcatgataataaacaccttcataggtcggcataatcacactggcgctggcgcccaaaataaaggccgcaatatccgttaaatataaccatggcgaaatggctaatacgaataaggccccagcagctaataacatgctgatactggttattttaaacgaattctgcacgtgacccagactattcacgaataataagccggtttttaacgcggtataaaataagatatacggcatataagatgccgcggtatgaccgctatgtaacattgttaggcctatcagcggtaagatttgaatcagttttgcaaccgcaaaaacgagcccttgtttgatcttttcactggtttctaattgtttaccatttaccatcagttatccctactttcattgactagatagtaccgtatatcgcgcctgatttcaaagaactgacgttaaaagcctgaatctcttgcacaaaaaaacaccgcaagttgtcgaaacaacttgcggtgtttttaattgggaatctattcccattccactgttgaaggtggcttgctcgtgatatcgtacacgatacggttgacgtgatcgacttcgttgacgattcgcacagaaaccttttgcaagatatcccatggaatccgtgagaagtcggcggtcatgccgtcgattgagttaacggcacgaatcccaactgtgtaatcgtatgtccggccatcacccatgacacccacactacggatgcctggtaagactgtaaagtattgccatacagttttatctaagccagcgagtgcaaattcttcacgcagaattaaatcactatcgcggacaatctttaatttgtcttcagtgacttcaccgaggacccgaatcccaaggccagggcctgggaatggttggcgccatacgagttcatatggcatgcctaatttttcgccaaggtcacgaacttcatctttaaataatgtatttaaaggttcaattaagctaaattgcatgtcttctggtaaaccaccaacgttatgatgtgatttgatggttgtcgcagtacttgtaccactttcaataatgtcagtgtataaagtcccttgcgctaagaagtcaatcccgtttaacttagttgcttcttcgtcaaacacttggataaattcgttaccaataatcttccgtttcttttctggatcagaaacgccagcgagtttgctcatgaaacgttctttagcgtcaacttggatgatgttcaagccaaatttaccgccaagactttccataacttgttcaacttcgccttttctgagtaagccgtgatcaacaaagatgctgaccaattggtcgccaattgcgcggtgtaataacaccccaacaacagaagaatcaacgccacctgaaagaccaagaaggactttcttgtcaccgacttgttcgcgaatcttttcgatttgcatgtcgatgaaatcgttcattgtccagttgtcttgggccccacagacgccaaatgcaaagttcttcaagatatcgttcccaaattcagtgttttgcacttcagtatggaattgaatcccgtaaatatgtttgtcgcggttttcaattgctgtaaatggtgtgttatcactttcagcaactgtcacataaccttctggaattgcagtcactttatcaccatgactcatccatactgtttgtttttcaggaagacctttgaataagtcactgtctttgtcagtcactgtaatttcagccttaccatattcacgttctgttgatgcttcaacattaccgccatttttgaaactgatcaactgcatcccgtaacaaataccgagaattggaatccctaattcaaaaatttcggggtcaactgaaaaggcaccaccatcgtaaacactcattgggccgccagagaaaataattcctttaggggcgatcttcttgatttctgctgctgttgtcgtgttaggcaacaattcagagaaaatcccgaattcacggatacgacgtgtaatcaattgattatactgactaccgtaatctaaaacgataatcttatcgaaatcttgcatgtccttttgggccaaacaactcactccttttttattaaagctgagtaaaacttaaatggtcctcgtttcactcagctcgattagtaacgctaaaacttttttataatgtatctattctactgattaatcatgaaaacgtcaatggatgacagccattcctgtgaaaaaactcattctattatcaatattttcgtagaaataccttatcaatcaggtgatgtttggttttatgcaaaattaaatcggcgcggtttcttgttggtaaaatatagtcgttcaaattacgtaaatcgatgtcgcgccagacacgccgggccatcttaaaggcgctggcgcgatcactaatcgcataaggataataatagttcgttgggtcatccttcgcgagatctaataagaggtcaaagcgttctaggaaccacttctcaattaaacttggattggcatccacgtaaactgaaaagtcgaaaaaatcactgacgtaaatttgttcggtcgtcggtaattgtaaaacgttgattccttcgacgattaaaatatcaggatcatcgatgatatcaaactcatccggaataatatcgtagatttgatgcgaatatttgggtgctttaaccggcgccacgttatttttcacagcgttcaagaaactgatcaactgcggcatatcgtaactttcggggaacccttttttatcgagaatccctttttgtttcaattcagaggttgaatataaaaagccatcggtcgtaatcatttgaaccgtcttatctggatagacccgactcagtaatagctgtaataggcgtgcggtggtactcttaccaaccgcgacactaccggcgatgccaataatgaacggggttttatgcggtttgatttctaaaaattcagactgcttaatttgattttcttggaattgttcatacttcatttgtaataaatgacggagtggcacgtaaatgtcactgacatcctttaacgagatgcggtcgtttaagccgctgacttgctgtaattcatcgtccgtaatggcggtgtatttttcgccacggccgtgaaaataacgccattcttctcgcgagatttcataatagttcatctcgtttttcatgctttaatcctcccagggcttaactaactgctaaacggttacattttaccataattaatattaaaaagtggggctgtgacaaaatattactttggtcacagccccacttatttcgttatttcgttaatgtatatttttctggatcgacattatcaatcaatggtgaaagtgcgtctgtggctaacaaggtcaagcgatgcattgctcttgaacaaatcgtgtagagcaattgacgttgatcttcatgattgtagttggcggcactgatttgccagccaataatggcatcgaattccaaacctttagctaagaaacttgggaccactaatgtcccggctgctaagcgttggttttcggaacgaatcaaggtgactttcgtacctgtttccttgagcatcttcgtcaatgcttgggcttgcaccaaagtcttggtaatgattgctgtcgacaatttgtcggcttcatttgctgctaattggcggttcacatcagccactagctcagcttctgattggcgcacaatcaagtttggtttatcgccaacgcgattgaaggcttcgatggcttggccaccttttaataagcccttggtaaagtcagtcacttgttgtgttgaccggtatgaacgcgttaattgcaccacttttgtattttgagcatcaaataattgttggacttgttgcaagagatttgtgctgttgcccttagtgaaaatcgcttggttcaaatcgcccaataatgtgaagcgcgccttagggaagtggagcttcaagaaggccaattcataaggcgtgtagtcttgaatctcatcgatgaagacaaagcgcatatcccgttcgccttttttacccgtcatcaaatcgtagagatgcagatatggcgtgacatcttgcaacgtcatctgcttagccttcaattgcgcgacgaaatgggtaacatggtcttgccattgctcttctgtaatatcgaagtcggctaacttcacaagttgtggcacaacccgtaagaagtgaatatattgcgcctggatgcttaagaagcgattacgttgaatagaccggcgaaccggtttgaaggcctctaacacgatttgcttggcgataaacttgctttcagcatcacccgtcttgaaatctttaccagacatcaattcacggatttcttcatcactcatattttcggcttgttcagtcacccagtcagctttggtttcgtgatcaaccttgtggctcaatgtccgtaacaagctttctttagtcgcatctaatcgattgccgagatggtagttttcattgaagcggtaataaacgtcgttgatatgctcttttgtaatcaagacgcggccctcgaccttcatatcgcggaagcgcatgtcggctttttcaagatgcgcagcgtattttttaacagccttataaaagacgagactttcttttaagcgactaatccgaccatcggtttcgttaaccggtgtttcgaattggtcaaaaagactctggacggccatattgggtaaccggcgggccacatattggaagtaagtcatttgaatcatattttgttcgcccaattcaggcaacacatctgcgatgtagtcgttgaataattggttaggcgagaacataatcacttggctcgaatctaaattgccccgatagcgatagagtaaaaacgcgatgcgttgcaagatagctgatgttttccctgagccagctgccccttgaacgaataacaaatcagcatcggtattacggataatctgattttgttcacgttgaatcgtcgtgacgatactcttcatctgcgtatcggatttttcacctaacacttctaataacatttgatcgccaatcgtttcttgcgtatcaaataaggccttgatttggccatcttcaattaagaattggcgtttaagtgagatattcacatcttgcgggccgtctggtgtttggtacgtcaccgcacccgtcttaccttcatagtaaattgatgaaattggtgcccgccaatcataaattaagaaatgatcgtcggtatctgtaaatgagcctaacccgatataaattgattcggatttaggttcacccttttcttgaaaatcaacacgggcaaagtatggcgtcttttccatcttttgcaaggtttccaattgccgagaagattgttgccacgagtgattgcgttcttgtagcatttgccgctgctgttcaatcgaaacggcggtttcagtcatcgcggaatcgttattgaagttaaggcgaacgtcgttgaagaagttctcgttaatttctttttcttccgattttgcgcgcttaacagccccttcaaaatgggtctcagcttttttaattaaaccaataatttctgttaatcggctttgttccaatgatttctgtacgtcagtcaaagcaaatgcctccctattttaaataaatagccctaccagtttaacacttaattcacatgagtgcgagtcaattggcctactggctattgtcagctataaaccagcataaaagccggctgcggccaccaacagacccaatccataggttaaaagccagtaaccaaagaagatgtgataccggcgccgaaaccacaattggctcaactcactatttaaggttgaaaaggtcgtatacccgccaagcacaccgacgcctaaaaagagcgtcaccggctgacttaattgagatgcggtcaaccagcccaaacaaaagcttccggttagattgattaaaaaggtcatcagtgggaattcactagcgacgtgattcccaattcgcgtcaattgataccgcaaaatggcccccaacgctgcccccaaaccaactaataaaatagtcattgtgagacctcctgttcttcagggccgtgtgtcaatttaaccgcccagtaatccgctagtaaactcaacaagacgcccccgaccatgctgatcccgacataccaagcaaaggctgaccattgttgctgatttaccaatcgaatggcatcaacactaaagctcgaaaacgttgtgaaagcactgaaaaagccagtcccaattgccaaggctaattggtcactcaaatgtaagcgtgccacgatatagcgcatcaaaaatggtaggcaaaacgccccaatcaaattgacgcacaaagtcccatacggaaacccagttggctgattcaataccaatccgattaaataacgcaagatcccaccgaaaaaggcaaagctgccaactgctaaactctcttttattttcataatcgtgacctgacctcttcttgtttttattccttccatactaaccaagtttagtcgaattgtaaattgacctttaatttttaaagtatctagtgtatcctcttaaacaactttgtatttcgaaaggatgttagtcatgactaaccttgcacttgtcatcgttttattagcggctttaatgacaccgcttctgatggctaaatttaaaatgtcctatctgcccaccgccgtcgccgaaattatcgtcggcattattttagggacgagtggcttccatttaatcgtctccaccccgactttaacggaactctcaacgctgggcgtgaccgttttgattttcttaagtgggatggaaatcgattttgacctctttaaaaaacaacccacaccaactgatccccaactaaaagtccaaccgagtcctgtcagattagcgattaccagttttgcctttatcttactgatctcatttggcttaagtggcttgctcgcttggagtggtttctttaaagctattggtctggcaaccatcctcttttcaacgattgccctcggtgtcgtaattgccgcgctcaaggaaaaggaactgcttagccaaccactcggccaaacgattctcttgattgcggtgttgggtgaaattatcccgttggtcgcattgacggtttattcatccctcaataaccccggttcgaaaagtctctggctcctatcattaattttcgttgctgcgatttatttgttagtccgcttcaaaggcgtctatcatttcttcgcccggattgataaatccaccacgcaactcgacatccgtttggctttcttcttaatcattacactcgtgtcaattgctgaagaagtcggcgccgaaagtattttaggggccttcttagccggaatggtcatgaaattattacggccacgcgaagaaacaaccgataagttaacctccatcggttacggctttttcatcccaatctttttcatcatgacgggtgctaaattggacctgccagcactcttagcggatcgtaaatcgttgtcgttaattccctttttcttcatcggttttatgctctccaaagcagctacctattgggttttaaaacggcgctttaaacaaactaatgcgattgcgggtacttttttaagtgcgacaacaattacgttggtcttacccattttaacggtgggtctaaacttaaaaaccattaccgaacaacaatccggggccttcaccttggctgccattttaagttgtatcctcggtccaatcctattcaatcgcttctatcagccaactcctgaagatttaccgcgcaaacgcgttaagtttatcggcgccaacattatgacgattcccattgcccaacaactatcaaacgggctttataccacgcaactcttcactgataaccaaggtaattacgaaatctaccacagtgccgctgacctgaccttactaccagatctcagtgaagacagccttgtgacatccggtgcttttgatgccgatattatcatcctcggttatctgaaccacgaacaaaattatcgcctcgcccaactagcacttgacgctaaggttccccggattatcgcccgatttgaagcaaaggatatcttagatgaaaaatacgatcaacttaaggaacaaggtgttgaagtcttcaatacttacgaagccaatatcagcttactccaaagcctgattgaaaccccctcgacccttcaaatcatcgataataccgatgctgggctcttcgaagttaccgttcaaaaccggcgcttcactgggttacaaatttctaacttaccatttgtggaccaagttaccattagccgaatttaccgcaatcaggaactgattatgccacatggtgacacgcaaattcacttgaacgatcacttgatattaaccggtaacaaaaaagctgtaccagcgattagacagcaattagaaacccgcaactaatccttgttaacactcgcacatctcctttaataggtttataatgaaactatcataattaaaggatggtgcagatatgaaacaaggaacaacgatcctcacattggataatggttatcatttgtggacgaacacgcaaggaacaggcgatattcacttactttgcttacacgggggccctggtggcaatcacgaatactgggaaaacttcggtaaggaattagctgatcttggtgtgcaagtacacatgtacgaccaacttggttcattttattctgatcaacctgattactcaaaaccaggcaatgaccaattattaacttacgactacttcctagacgaagttgaagaagtccgtcaaaaactcggcatcgacaacttctacttaatcggccaatcatggggtggcgcattagttcaaatgtacgctgctaaatacggccaacacttgaagggtgccattatctcaagtatggttgatgaaatcgatgaatatgtgacaaacatcaacaaaattcgcgaagacatcatgacgcctgaacaattaaaattcatgcaagactgtgaagctaagaacgattacgataacgacgaataccaagcacttgttgacaagttaaacgctggttacgttgatcgcaaacaaccattagctatctcacatttaatcccaacaatggcaacagacgtttatggcgtcttccaaggcgacaacgaattcgttgtgactggtaaattgaaggactggcacttccgtgaccaactccacaagattactgtcccaacattaatcacatttggcgaacacgaaacaatgccaatcgcaacagctaagatcatggctgaaaagattccacattcacgtttggtcacaacaccaaatggtggtcatcatcatatgattgataacgccccagtatacttcgaccacttaaagacattcatcaaggacgtagaaagtggcaacttcaaagactagagtgctgactggcgtgcttagtaattgagcattaatacaaaaatcccattaatccggttttaggattaatgggatttttagattaagcggaaattattacgccaggaagcacgtttagagtgctaactcgaacgttttggctttgaggattaacagaaaaatggtaatgatggtgtttttcaaccatcattatcattttttagttaaccggaaaaggtagttcgagaagcacgtttaaagtgcgtttgaaacggatagcttctgagcattaacacccaaaaaagcacctaggatttggtgataatcccccgcagtcattgcctagcggattttcatcatagcttaggtgctttttactttttaaattaggcttgttgctgtgctttttttgaaaggtaattataaaaacaatccgtacttttgaaaagcggcattagttcctgattaatttcgccaatcatttctttaaataaagcttcaaaatcatcttccagctcttcaattaactgttcacctaatggtgttagacaaataaaaactttccgttgatcttcaatatcgctccgctttttagtaatcaatttctttttatagaggacattgaccttgcgcgaaatcgccggactcgtaatatcaaacatccgggacagctttgtcacttcaatactagggattcgctttagttctcgcataatcaaatattggtcgtaactaagatcatggctcaccgtaatatgattaattttatgatagatttgaccaattttaaggtaccattcattaaactgatctacactgattgcagtgcttactttgtttgccattcaaaatcatccctttttattaatatcgttaaaaatatacttttgtaaaatacaatattagtaaaagttatcatatatattccaacttttaaagatatacgctcattcgttaaattaataatcctgatattagtattaactatgtttcatgtgaaaatgaagcgctatctatgctagaatagaattaattaaagctttcgatggaggtcattacatgaaacgcattacactctacttagttcgtcacggacaaactttcttcaaccgctacaaccggatgcaaggctggtccgattcaccccttaccgaaaaaggcatcgcagacgctgaactagccggcaaacaactttcaaaggtgaacttcgcccaggcttactcaagtgatcgcagtcgcgcgatggatacggctaagattattcttaaaaaaagtttctacctcgacacaccctatacaatcacccctcatttccgcgaagaattctacggttactatgaaggtgaagattccgcgaaagcttggtacatgactggcgctagccacgacgctaaaactttcaaagaaatcattacgaagtactcactcgatgcttcaaaagacttcatgaaagaagctgatccttttaacgacgctgaaaatgcggccgaatattgggcccgcgttggtaaaggcttcaaacaaatccgctcagaatgttcagatggcgacaatgtcttgatggttagccatgggacaaccattcgcagtatcgtcggtaaatttggcaatggtcaatttgacgtgacggtcagcccaatgaacggcagtatcacaaaagtcgtcctcactgatgaaggcgtcactgttcaaagttataatgaattaaccctttaaaatatcaaaagaagcgctgaagaccaatttggttttcagcgcttcttttattagtgttgatataaattaacgactgattgtctgatgaccatttctggatcaacaattttttgttcaacgtctgattgctcgccttcaacaatcgccattaatttggcgacacccatttcgatgatttgggcagtcggttttttaattgtcgtcaatgacggcgtaataaatttggcatatgccatatcatcaaacccgataaatgagatatcgcgtggaatctgataaccaagttcaacacaggcactaatcgcaccaaccgccatatcatcattctcacaaataacacaggacggaatattaccactcgccagaatctcccgcatcaattcatgaccactctctggtcgataatcgccgactttaattagtgtcgggtcaactgcaatgccattcgcctcaacagcttgcatgaacccattagtccgctggacggatgattcgaacgaatcaatgccccggatcaacgctagcttacggtggcccatttgaatcgcataattagtggccaactcaccacctaatcgatcgccaatcgcataattattaatgtcatcacgttcgatcacccggttcaaaacaactaacggtaagcctaggttatgaacatattcaataaaatcataatcagatttagactgactaataacgataatcccgtcgtagttattaattgaaatatactgccctgccatcgctttggcgacactattaatcgaaagcgaataactcttgggcaataccgcttgcgcttgggccacaacatccgtcataaagctattagaagtccctgtttcaaggttggtaaagaaaatcccaatcatataagaccgatttgtcactagactcttcgcgttaatattaggcacatagccgatctccttggcaatcgctaaaattttctccttcgtggctggttttaccagctcactatcattcagtgctcgtgaaaccgtcatatgcgagacgtttgcaagttgtgcaatcgttcgaatcgtgacggttgtcttatcagcctttttcacgccgcatgcttcctttctgtacgctcttagaacattgtaccagaaatcattgcgcacgctgaatataaaaaagaagccgcgataattcatcgcaggcttcttccatttattttaaaaaaagtcgaaataatcgtgcgcattattataggcaatattttgaacaacacgccctaattctgcagcatcgtttggcacacgaccttgttctaccaagcggccatagaagctacataaaacacgtctgaagtattcgtggcgtggatatgataggaaactccgggaatccgtcaacatcccaacaaagtgtggtaagaggctctgttgtgcgaagacttgtaactgttgggtcattccttcggcggtatcattgaaccaccagccggcgcccaattgtaatttttgcgttgtcccaccttggaaacagcccatcatggttgccaattctaaccaatcattactgtttagtgagtagaaaattgacttaggcacgtcttcagtttgtcgcatcttcgtgtagagtgcgctgatatggttaacaatgtcaggttgtgtcccgacagcatcataacccgtgtcaggaccaattttagcgaacattgggcggtttaaatcacgatcagaattgatatgaaattgcatcgtccagttgaattgcgtattgagtttcatcaatgcttctaacaacattgtcaaatattggttaatttcgtgttcactgagtgcagcgttattaatccctttagcaacaatcgcatccaattccgctggcgtcgcttcttcaaaatggtaagtcaatagcgaatgatccgataagcgcccgcccattttattgaaaaattcgaaccgttgcgtcaaagctgttacaatcgttgcaaaatcatgaatctcaaccccagctacttttccaagggtcttcaagtaatcaccaaaaccgtcacgatcaatttgcatcaattgatcagggcgcattgctggcaacgtcttaaagccgttggcagcttcttccggttttaataactgatggtagtgtaagtcagaagcaggatcatcagttgtgcagaccacttgtacatttgaattttttatcaattgacgtggtttgaagtcgtctgtttgtaagagttggttggccttttcccagatacgtggcgctgattccgctgttaaacgttcatcgatgtggaaaaagcggcgtaattccaaatgcgtccattcgtaaagtggattaccgtaggcattttcgattgtcttagcccattcgataaattttaaataatcatcgccatcaccggtgatatatttttcatcaacgccgttggcacgcattaaacgccacttgtagtgatcgccgtacgtcccttcgttcaaccagatgcgagtgatgttggtatagttcttattttgatagatttctgaagggttcaaatggcagtgaaagtcgataatcggcatttgcgctgcataatcgtggtataacgtcttggccatgtcattgtctaagagaaaatcatcatctaataattgcatatcttaacgctccttcatcgtcatgttatcgttaacatttaatgcgaaataaaaaagaaaaaccgcgcgtcttttcttcaacatcaataatatagcgctttcataagcgattgtcaatccttcttccaatccaaaaaaggcctgtcaagcgctttgaactgcgcttaacaggccttttttatttattctccaaatttagtttcttttaaaacaattccgcgatatagccacgttgtcaccacatagtacacggcatataacacgatgaaaatactgaatggaatccaaatttgattgtatggatcgatcattaattctttgaacatttgtaagccgaacaagacgtgcacgacaccaacaatccctggtaataggaataatgcgccgatttctttggcaattgattgcttcaagaggctttgacgaacgccaattttagccaacatcgtatagcgtttcacgtcactagccgcacccgataaaattttgaacattaggcaactagctaacattgctaagaaagcaatccctaagaagaagcccatgaattcaagaccactgaaaacgccgttagccatcttatagctgacatacttactactatcagcttctgggttagccttcaactctggattggctttgagttgctcttgatataacttcttaataacaggtaagttagcgctaaagtcttgcacatcgtaggttttaacaaccttggttggcgctgcgatttgtgcaaagacctcattagaaacaagtttaactgctttagccgtttgacttggtacttgaattgatctgaagagataggtatcccctgtttgaagttcacgtaatgggacttggcgaacttttgtctcggtagaaacgctacccgtcttaccatattccatagtcaataacggtgtttgttttagttgagcagtccggtaataaactgtcttcgcatcttctttcacttgatacgtcgccgtttgtttaacccctttgagatccttagtcagtgtcaaagctttttgagtgggttgatttaaaaccacatcataggcagaagctgaatcagcaatcttgggaatttcattttgataaccaattccgaccgtaatcgcacctaatgcaagtgcaaaaagcatcgctactaaagccaacatttttgtgtaatccttaattcggaaactcaattgcgctaacgtaaagttattaaggcctttattgcgcaacttttcattgcgttttaagagcatcaataaccaaccgaaaaaggcgttaaataggaaataggtccctaaaacaattgtcactaaggcaatcactaagcccatcacttggaacgttgcgattgcaatcatcatgtaataaccaactgctaagaatacgaggcctaaaacgatttgaattaagcgcgtaactttattttccttaatgcggtttggttgttgatcatcatggagtaattgcaagacaggtgttttcaataattgatattggttaacaaccgccgcaatgatgaataaaacgatgaagaaaatcaaggtggtaatcaccgctggtaagtagagtggtgagaaatgcttgatatgcatgtctaatcgagaaagtaagaattggctcacaacttgcgttaatccaatcccaatcgccgtcccaattaacgtggcagccgtcccaatgacgagcgtttcagctgcaatcaattgggcaatcttgcgccctttggcacccaacatcatgaacatcccgtaatcacggcgccgcatactcatcaagaaactattggcgtagataatgtagaccagtgtgataatgccgagtaagacggaaccaatttggaagacaatcgctgccatgccaattggggaattactcgtcacaaaatccttattagtcgctaatgcttcgaacatgtaaaaaatggcactcgacataattaggcccgaaaaaaggactaaatagtctttaaaccggcctttaatgccggttaatgataatttccatagcatatttagtcttcctcctagtggttaaatgttcctaatgtatctaaaacttcttggtaaaaggcttcacatgttttgtcaccacgcactaattcttgtccaatttgaccgtctttgatgaagagaatccgttggcaataacttgctgagaatggatcatgagtcaccaataagattgaaacgcgttgttcttcgtttaattgggccattgtatccaataattcacgggcgctcttagaatcaagcgcaccagttggttcgtccccaaaaagaatggctggattatgcactaaagcccgggcagcagccactcgttgcttttgtccacctgataattcggttgggtacttattcaaaatcgcatcaattgataacgttttggcaattgttgtaattttttcgcggacctttttaccagtcacgttttggagcgttaatggtaatgccatattttcgtaagctgttaagttttcaagtaagttaaaatcttggaacataaagccgatttcttgagctctaaagtcagctaatgcattgccttttaagcggctaatttcttgatcgttaatcttcacttcaccggcggttggtttatctaaagttgataggatatttaaaagcgttgttttccctgaaccagaagcacccataatgccgacgaattcgccacgttgcacatcaaaggtcacgccttttaaagctgtatattgtttttcgttagctttaccgtacgttttttgtacatcttttacgctaacaactgttggtgtgtccatagttaaatgcctccaaatttcattaatacaactagtatatcggattagattgattgccgcccgtttttgaaatgacaatttgttaatttgaaataacaagtttgtaagatggtttttttaaaatttcatgtgaaacatcaaaaaaattttgtcttcctaattatctttgactataatagaaacattgctattttcagaaaaggggtatttttgtaatggatgaaattgaaccaaaaaagaaatacattacctggcaagtcctcgctttaatggattttgtcacggtaattggcttcgatgatattatttataacttccaaaaccaagggatggcagttgtcttctcatggatcgtgctattattcgcttatgttttaccttatgaattaatggttggccacttaggctcagctttcagtaaagatggcggtggtttatccagttggatgcgccataccagtggggatgtttggggttacctcactgcttggtgttactgggttgccagtttgccttacttagtcgatgttgccaactcaatggtcgtttccttcttctggattatcatggggaacggtaatattgaagataagttatcacgagccacatttgcgctcttaacagccgctatcactattttattcatcttcttccaacataaatttacagcatcactgcaagtcctcagtattgttgggggtggcgcaatgtttatcatgacgattttattcgttctcatgacatttgccggcctatttaacggcgcccctatcgccacacaaccaatgaactggcatacttttattcctaaattcgatttacattacttctcaaccatcggccttttaattttcgccatgaacggtgccgaattagtcgcaccatatgtcagcgaaatgaaagatggcaaaaaagattttcctaaagccatgatggccctcgctttaatgacagccttcttaacaatctttggttcatttgcgattggtgtcttctttgatgccaaccacttacctaatgatttaaaaatgaacggttcttactacgcgttcttagcgctaggtcaacaattccatatgggcaaagtcttgctctacatcttcgccgttacacaagccatctacatgggcgcgcaactcgctatgttactcgatggtggcacccgtatcttcttatctgacactgctaagaagttcttgccaaaggccctcacaaaaactaacaagcaaggcttaccaatcaacggttactggttaaccactgggatttgtactttcgtgctagcttcaagtgccttcttacctgccatcaacgatatctttaattggttgttgaatatcaacggcatcgtctcaccatttgttacttgcttcatcttcgtcgccttcttacgggtccgcttcaacagcgacaagtacccatcagaatatacgtacattaaaaacaaaccttgggcaattattgttggtttctggtgcttgcttatcaccgcattagggacaatcttcagtatcttcccacaagatgccacaccgggcacttctaaatacacccacgaattgatcttaaatgttgtagtttccgtttcattaatgggcttaggagtcatcctcccattaatcgctaagtatcaacgaaaaaaacagcttaaataaaaacggctaagacctgtgattttacaaggtcttagccgtttttttatttaatcttgatgatatttcttttctaagtagtaatagattggtaagccaatcaatgtgattcccaacccgattaaggctaagatcgtttgcgtgaataaggtgttaatcacaataaacgttccccctaaaatcgcgattaatgggactactggatataaaactgctttgtaaggccgtttcatttctggttcgcgtttacgcaagataatcactgcggcaaaggtcatcacatagaatatccagatgacaaagattaacatatcggtcaaggtattaaaaccacccacaaaaatcatgccgatcgcaatcactaattgtaaaatcccgcataaaattggaatgccagcttttgataagcggctaagttgtttgctaaatggtaagtgttgttcagttgccatcgcatatggtacgcgcatcccggtcattgtataaccgttaattgcaccataaactgaaactaagatcccgatggttactagcttgccaccaaaaccgccgaataaatgaccagctacttcggcagcggcattttcgttaccagcaatctgtgagattggtaagactagtaggaagactgcgttaactaagaggtaaaccaccattgttccaaaaagacctaacaaaattgattttggtaaatccttttcaggatggcgcatttccccggcaatattcccaacatgaatccagccatcataggcaaataacgttgctaataccccattacccaatgctgataagacattattcgatgtacccgttcctgctacagtaaagagtgaaacgtgacttgcgttagtccccgggttaattaacccaaaaataataataatagctaaaggaattaatttaaagacagtcgtaaaggattgaacaaagccacccacacgacttccaaagaagttcataattgttaaactcgttgcgacaatgactgcaaccggaatttgccagctaggcgcccatccaaataaattcaaacattgtgtcgcaaaaataattgataatgcagcaatattggccgggaaataaaccgttgtttgcgcccaacctagtaggaaggctgcgacactgccataagttttctcaatatagcgcatcataccgccggtttctggaatcgcagctgccagttcagcagccgttaagcccgcacaaatcgtgatgataccaccaagcaaccaggccaatattgttagccccgttgaacctgtgacttctgttactgatgatgctttaaaaaagacgcctgcgccgataacagtccccattactgttgataaggcggccgtaaagccgactgttcgatttaattcttgaggtggtgtttgcgttttgatatcaatcactccttcctaggtataaaaaaacattagttatcatattttaaactaaaataaatgacagttaaagcattttctgcgggtaacactgttgaaaatcaaccaatgctcccatcaggttagcatcgtcttgatactgactcgctaaaagtggtgtctcaaatggcgccagctgaacttgcgttaataatttgcgacgttcaatttcaatatgggggactaaaaaatcaatcttttcaagaccgccccctaaaataatggcttctggattaaaacaatattgtaaattataaatagcttgcgctaaatgttgataaaaggccgtagtcacttggtgtgccaaagaattgccttgtctcgccaaagcaaaaatttccgttcccgtcagttcagcatgggcttgttgattatattgttgcgttaaataagtaatggttcccacctcacttagcggatgaccatcagacattaacatcgcaccaaattcaccactaaacagatgcgaaccatgttgaatgtgtccatcaataatgaccgcacccccaacatctgagtcaatcgccaaatataaaacgttctgtaagccctctgctgaaccactgcctaattcggccaaggctgcacaattaatctcattttccataatgacgggtaatccaaatcgcatttctaatgcactttgaatttcaaaattatgaatgtacgggagggcactggcaccttcaataatcccagtcgctttattgactgccccgggtgtgctcattcccacgccgacgatttgatctgacaattgatatgtccgaacaattttggtcaacgctgcataataagcatttagcgatttaggggtcgcaaccattccctgctttgttaacttatgagcagtaccatcccataaggcaaatttaatggttgttcccccaacatcaatcagcgctaaattagccattctccaatcccccccaattattatttaagataacaattgttaacttttgaacttaatcaaaaagttaacacctcgttatttgtaacgctttcattctaacataaaataccccataccgctattctacttagaatggacaattctattactttgtccgctgtgtttcgcttcggtaagcgttatcattgaattgtgaaataattcagaataaggagccccatcattatgaaaacaaactttgattttttaatgcctagcgttaacttttttggccctggcgtcatcgaaaagattggtgatcgcaccaaaatgttaaatattaccaaacctttaatcgtgactgatacttttttagaaggtgttcctgatggtcctgtcgcccaaacactcgcttcattggatcaagccggtgttcaatatagcatctttaacggtgttgaacctaatcctaaagtccgcaatattcaagccggcaaggcgcaatacctcgctgatggttgtgatggcctcattactgtcgggggcggttccgctcacgattgtggtaaaggaattggtatcttgctcactaacggtgacgacattaccaaattagctgggattgaaaccttagaaaacgccctaccaccactattagcggttaatacaactgccggaacaggttcagaattaacccgccactgcgttattacaaatgaagaaacccatcttaaatttgtcgtcgtttcttggcggaatattccgctcgtttcatttaacgatccaatgttaatgttagatgttcccgctaaattaacggctgcaaccgggatggacgcctttgtccaagccatcgaaccctatgtttcaaccaaccgtaatgcgattactgatggccaatgtctccaagccatcaagttgattgaagaaagcttgcgcgaagctgttgctaacggccataacatcgaagcgcggaccaagatgtgcgaagctgaaatgttagccggtatggctttcaataacgctgatcttggttacgtacacgcaatggcccatcaattaggtggccaatatgatgcccctcatggtgtttgttgtgccctcttattaccaatcgttgaagaattcaacatcgtcgcttgtcccgaccgttttgcagagttagcacgcgcgatgggcgaaaatacggatgctctttcaacaagagatgccgctgaacttgctatcaaagggatgcgccaaatggcagccgatgttggtattccaactagcatcaaagcaatcggtgctaaaccagccgatttcgaaatgatggccgaaaatgctttgaaagacggcaacgccttttcaaacccacgtaaggcaactaaagcagaaatcgttgcccttttccaaaaggcatatgacgctgaataatttaaataaagctaatcgtcttttactgacgattggctttttaattatttcatgttacacttaacgggaaaacagccgttaaatcggccgttttaaccaactagattttttaaaggagcgtcaacaacatgtcaactcaatttgatcgtccaggtttaataattgaataactgtttggtctttttttaagggcgcttctattgactctatttttataatactgctaattaacgataagaagctgcctaccagcttcttttttaatgcagaagattcccttaaagagggccaacttaacaaaaaaggagtctcatatgcaagaaacaaaaatggcacaaaaacgagtattaattactggcgttagcaatcgccaaacaaactttgactatacaatgcgtgaattaggcgaattagcccgcgctgataacttagaagtggttggtgaagtacgccaaaacatcgatcaagctagtcaccgaacttattttggtaagggtaaagtccaagaaatcaaggctgaagctgctcaagccgatgctgatatcattgtcgttaacgatgaactatccccttcacaaattagaaaccttgaaaaagaattagaaatgagtattctggatcgcacacaattgattctagaaatctttgcgagccgcgccaagactaaggaagcccaactacaagttgcgattgccgaagcaaaataccaattgccacgcctacacccttcagaaaacaaactggatcagcaaggtggcggtggttcaactaaccgtggggccggtgaaacacaacttgaattagatcgtcgtttaattgaaaaacggattactaaattaaagggtgaattagcccaaattgatcaacaacaagaagtccaacgtcgtcaacggactaaaaatgcggtccctgttgtggcactcgttggttataccaatgctggtaaatcaacaacgatgaaccgtattttacaacgtttgaatccagacacacctgaaaaacaagtttttgaaaaggacatgttatttgcaacccttgatacaagtgttcgcgaaattgttcttcctaacaagcagaaattcttattaagtgatacggttggtttcgttactaaattacctcatcacttgatccaggctttcaaatcaaccttggctgaagccgcggatgctgatctattgattcacgttgtcgattattcagatcctaattacctcgatatgatgaaaacaacacaagaaacgctcgactcattaggtgttaaggatattccggtcattgaagcttacaataaagctgatttaaaacctgatacccgctacccagaagtcgatggcacacaaatcgtttactctgcacgtgatgaggttgctattgatgctttaatcgcgctcatcaacaagcaactctttgaacaatatccaactcttgattttctcattccgtttacagaaggccaagcggttgcttacttaagcgaacgcgccaacattctggaacaaagttatgaagaagaagggactaaaattcgggcacaaatcagccctgatttactaggtgccgttcaaaaatatgttcaagaataactaaaaaaaacagcgtcgaaaacagtaattgttttcgacgctatttttttaattattgatatttttgaaaaactttatccgctgcttgcataatccgttgcacatcagccgaatcaattttaggggcgattactgggccatcctgttcataggcacttgaaatcgcttctaaggccttttgcgcacgtggacttaacatcacgtattgttttgtccgttcgctatcgcgcatccctaagagccagccagcatcctttaaacgatagaggtcttcttcaaccaatcccgcactgaatacaatttgtgcatcaacatatcgacccgttgtcatctcattaatccgttgtaataagatagcatcgtctaaactgatattaacgtcacggcaaatttcttctaggtggtcaaaataactaagacttgccataccggcttgaaccgttttaatcatttcgcttacaggatcttttctatttaggtaatatactgacattttgataaccccacttcgttcggtattaacaaccttacttgattatctttattctataccagcaggtagcgaataaatctcggggtttttttagatttgaaaaatatcgcgaaacaatcattaatcattagcatcaacaatttttgaaaagttgtaatagtttgattagcgattggttatcgtaaagacaatcggctttttaagcgggtcatagcccttagttgccgatacttgcaccaaacggtacgtatcaggatcgagatgtgtgatgcgaacttgaccatgttcatcactcttcaagttttcgacaagcactttaccactttgattttgtaattcatatttcgctccaaccaaagcttggttcgtattgccatctacttgatttacaatgactgtcccttgtgactgatgactttcaatcgtcacttgtttaagttgcgcatcctgtttaatctcgatgatttgatcgttagtttgtttttgatagctaggtgccgccgtcaattgtacgagtcgatattgaccaggtgtgaggtcgttaactacgacttgaccagttgcacccactacaatttctggccgaaccgcctgaccagctaacgtttccaatcgataagttgcactagcaatcgctaactgcgttttctgatccctatcgatcaatacaaaactccccaatttaacatcgggtgcttgttgctcagccttaatggcgaccgttgccgttttgcgatccgtaatggccacctttgtcactgccggattaatttcatacccagttggtgccttgatttcttgaacagtatattgccccactgctagctgggttaatttaatctgtccttgactatcagtttgataataaccgacttctcgaccactttgatccttaacctcaaagtaggcctttgcaatcggtgcgccctttttagttgtatgcttaatcagtaactgccccatttgtgcttcatctgttaccgttagttgtgttgctcgcggtgatttttcagacaacgctacaattctaggttcagttgctaaccggtaaccaagtggtgcttccacttcagttacgcgatagcgccctggtttttggtcccgcaactcagcccgaccggtttgatccgtttcaactttagtcatctgaccagttttcagtgactcgactttaaagacagcacctgataaaggttgcccttttaagttggttttattaatcgttaaggtttgcaatggcatctcaattcgattagcttgtaattgtaactgattttcaccatagcggctgacatctaattgactttgatcaaacgacaattgatacccggtcggtacttgtaaaacctcaacccgatagtgccccgtacttgcattggggagtatagcctgtccgaatcgatcagttgtcaattcccaaacggtctgaccttggtcatccggttgatcggcggttagtcgcagtaaaacaccagcaacgccttgcaagtgattatctaaaatctggatgcgcaatggactgattggcgcagtcacttcacgtttatcagcaaagcggacttggtataaccgtttttcatgggctttaatcgtcacaaactgaggtgtttgatccaactgatagccagttggagcttttgtttcctgaatctgataccgtcctgggttcaactcagtaaagtgtagttgcccggacaccgtcttttgcatttgtgtctgaccagttgccaaattagttaatttaatggccgcatcgtctagcccttgcccttgttgattggttttatgcacgataatttgctgtttttcagtcacttttagccgctgattatcaactgttacttcagtgttttgtgccccatcagcacccacaatcgccgtttgaatcgctgctagtggctcgtagcccgcagcattggcaatttgctcgtaagttatttcgcctgttggtacttgcttaatggtcacttcaccatcttgattcgtcttttgagaaacaaaaacagtttgaccgttatcagccggcgttgctgtcgttaaagtaaaagcagcattggctaacggttgatgcgttgcggcatcgcgaactctaaaagtaacatccgctaccgttcgttgcaattgccaatctacagtattctgatggtcgttactaattgttaatgactgaacagcagtggctggctgataacccgccaccgttgattcttgcgtcacttgatagtcgcctactggaacagctgccaaagtagctttacctgttgccgttgtcgtaactgttcgctcataactttctttagaacccatcagtttgagctttagttgaacgccagctagcgcttttccttgcgcattagacgcattcaaagtaacgtcatgtttcgcatccgttcgttgtatctgatgaacaaacgaaacagctgttgtttcctgatcaagggttatttcctgggaaatgttagccaattgatagccatccggtactgcaacttctcgaatctgataacgccccgcgggtaattgcccaactgttacctgcccgttatcatcagtttgaacggttcggtattgttcattagccatcgtcgtaacacgatagctcacatgtggtaaagctattccggattctgaaagactggtaatctttaacattttagtctggctaattgccgaaaaattgacctgcgccgttttatctttagtaaccgttataacttgatcattagcgcctacaacactgtaatgagggatcatctttgtaacggaaacgcgataatcgccagttggtaagcttgtccaattcacctgtccatgattatcagtcgttccagtcttctgataagttgcatccttaattgactgtaaatgtagctgaacaccgacaagcggatcaccagttgtttggtccgtaactgttgtcatcatctcacctttggtcttgccaaaaacaaccgtcgtcgtcaacgattgattagcgctaaccgtgacagtcggagcccactgtggttcactactatctgggtgaaaaatcactttcaattgataacgtcccgttggtaatgtcaacttagtccaacccttgtcatcacttgctggtgccgtgtaactttcatttgttttttgattaaccgccattaaaacaacaccagacaccggtgtgccgtcttgtaattgcgtcttaacaactaagtcacctcgactcgcatcagtgtagtataagtgatagaaattagcttgatccgcagcaatttcaattagttcattagacttttccaattgatacccagttggtgcagcaattgagctaacgtgatatttcccaggcatgatgccacgaacagtatgccctgttagtgtctcaacaactattttgaaaaaaccacgattatctgaacttaacgtatagtcgtatttgccattctctgattttagcattgggaacagcttgttcattatcatcaagcccacgaattacaaaagattcaactggtgattgcttcttagtatcggttgccgctgctaatgcggatatatcaaaaaggctcagcattaagctaacaaccgtcaaaataaccgttagtttccgaaaataatgctgttgcttcaattctatcacctcattcaatttcattttgaacagcgtataccccttgtcctgctagtgcaccaaagaccgccccgacttgagttgttgcgccgccagatggtgtattagggctcatactttgttggaacatcgcgatatctttttcaacttgagcgtgatgcttcagaaaatctgcttgttgttgatcttggtttgcattgtcttgcccttgttgattcccatgtccttggctgcttgccttagcatgtttcttaatcgttttttttgcgattttatgggtatttttagctgtattagcggttgttgcctcagcagctttagcttgatcctgggtcgtttgcgcaacggattgcgccgctgttgatttatcgcttgcattagtcgctttttgagctgcacgttgttgctcttctgctacttcttgcgtatttgctgtcttagattgatcctgctgtgctgcaggaacttgttgggccgttgttgtcgattgattagtcgtttgttgatcaggttgcgtctttgaaactggctgctctgtttgggcagacgaacttgaagactgtgagtctgatgatgactcaatcacctttgtcggatagtttttaaccgtaatattcaattcattacccgttaaagcacctgaattttcttttccaacagcggtatctgctgctgatactttttgaacttgttgcatcaaaaaagtttgtgaaaaacgataaacgcctaaactaagaattgttaaggcgaggatctgcttgcctgatttcatagtttcccctttttaatcgcgaccactaaatccccaaattgctgccagttcaaaatagtaggcggattcttccaaattaattgttcacaggtcaacgtgcttgagtaaaaatcagataggtagaggtccgtccgttcatcaacggtcgtttgcacttcgatattcagattgttaaagtagttgactgttttcttcatatactgattatagagtctaccttgtgagaaatccacacaaatataaacacgatcttttaatatttcgagcggaatatcttcaatacaggcaaacatgtaatcataatacaaactcgcctgtttacgccaatccaaatccgtttcttgtttggtcgtaaacgtcaaaataatttgatgaaatagtggatttgcttctgcaaaataggtcaattgttgttcatcaataaaggttgttggttctgtgtaaaaaggttaaatgctttgcatgaatttgatctaaatcatgcgctaagttagccagaatattttgagcttgttcactatgcgcttcatctttcatcaagacgtgctcaactttgctaacaaattggccggtcttttgcgacacaccatttttaaggtccggtgttaaatagtcaatttcaagtggtacataactttcggtaaataaaaacgtcagtagaccttctgcttccacttctagcggaattcgtaataactgatagttagtcgtcagcatgctcaataccggctgccatagttgcggttgttgcgtcttaaaatcgggcgctaataagggggcagttaacgcgtttttcccccgtaatcgcagtgattgtaccttgagataagtctccaactttgtaattgtcgttggtagtagattaatctgaaactgatcgcgcatcgtcactaacatctggtcgacagtttcttggaataacgccaatggtttttcaatgccattaaagtaactataatagatttcaaaaacaaactggcgaatctgcatttctgggccaatcaactgattttttttgaattgaagattaaaatgatctgcgacttctaccatttccttccgcaattcatagaacttagttttcccaatgaataaagcatcgcaaaagtcagtcgtttcatttttgcctggattcaataaactaaattcaaacatcttgaataaattagattgttgtaagtagtctagtcgaattttacggacgattgattcactgatatggccactttcaaagatgccatccccattaattctcaaataactctcagggctcatcatcgctaaatccgcattaaccgtctcaacatattgactaagtttgaacttagataagcccaataatttcatcgcacgatttactgttagatagtaatccccatgatcagcgactaattctaataaataatattgataacgataattcaaatctagaaattcattatggatttccactcattttcctccagattagatttaagctcttttttgataggccatttgaaccattaattgataaggatcactgccttcaacaaccccactacggccggccatcttatgtggtccaccagtaatccacgtgtgggcaatcgctaattgataacgatcggttaattcctggattggtgtgagccccactgatttgataacagcaagtggcgccttggccatcgcgttaatgccaccataaaccacccactgaccgtcttcttgtttaagctcataaaacggtaaggccactcgttcaccaattgcataaattgggcgttggaaatgttgtgcttgctcgtaaatatcggcatctgccaacccagcgtaatttaagctgatatagccagcttcaattaattgtgcgactaattggtcgagttgttgttgatgcgcactatcgacttctagttgtgctggtagcaaatccttctcttcaaataagccggttgctggctggacttgtgagatgattttaggcttagctgtttgtccagctaagggatgtggcgcagttggatcgccacccagcgccttttcgacgtatggtgacacatcgacaaccgcgttgcgaccacgataatagaaataaagattcatcactgcaaaatagagtaatactaaaaaaacaattagattaatcacgcctcgtccaattgcttgtgctctaaagtagtagatgctcttatatagtaagtaaaaatcaccgattagacagatgattgaaaaaattcggtttttaacccgattattaatgtttaagtagccaaaataatgattaatgatatccaaaaaagataacattgcgcattccgcctttcaatattaacagcagttcgttattgcgttgcactaccgctagtgaccttggccacgttttgggatgtccctgttgatgacgctgcactactgctgttattagttgttgtttgagtatcacttgttgtatcgcttgaatcagctgactcgtcgttttgcgttgtatcagtcgtctcgcttgagctggtttccgtcgtattatctgtacttgattgttcttgatctgacggcgttgatgttgattccgagctgcttgatactgattcttccagttcgctagatgattggctgctagtcgtctcatcgctttctgaacgactcgctgattgactactgcttacactgctttgtgagctttctgaaacggaagtcttttgctccgtcttaatattagcgaccggtttaacagtattaacaacgacgttcgttgcgctcattgcaataattaatgaaataatcgctgctgggggcacgattgggggcgtatgaaatgccataacactcttccttcctatctattcattttcttgacagtcttcacaaagaccgtataactcaaattgatgtccttcaacttggcagttggggagttgatcactgaagaaatccagtggacacatcttcaactcaatcaccttgccacagttacggcaaataaagtgatgatggtgacgatgttcaaaatcacactgatacttcacatgagcttgttcgccttcagtttgttgctccactaaaccgagctgctcaaagtctttaatattgcgataaatggtatcatgactcatccctgggaaaatcgcccgcatatgatcgtcaatttgggtcactgggatgtaatgattttcgtcctgcgctaaataagtcaacatttcgcgacgttgctttgtgatcttaaatccgtttgcttttaaaacggccagcgccgtcgtcatttcactcattttaatcggttcctttcttaatacctactattcagaataactgattatagcattaatcgtcgtcattttagttttaaatggtttaattgctacacactattattatacgctcttataatggtccgtgacgaaaaacaatttccccttttaacaaattttaatcaaactcgagtaaaaatagttgcaattaacccggtcaagcgttatgataatactcagatggtttttaggaaaccgtcttcattggccttctaccagtgttttagttatttgaagggagattttaattatgcaattacaaaacaaaactaataattggtatcatgtttcacttgatacgcaaactcaaaaatttatcgcaactgcaacgaacaatgaaaaaatcagtgcaagtggtattacaattgaacaagctgtccaaaaattaacatttaaagtgaaacaacctaaccgtgcaaacaagcgacaacttgcttaagcactaatcgttaaaagggaagcctgacaaaacaacgttttgtcggacttcccttttttgttattgacgtaactgttcaataattgtcgtcaatgtcttttgcgtttcttgccagtcatcattcacaataatctgtgcttgatcatgtaacggtcctgaaaccattaaatcccgtttaaattccgcactcgcaagacgtttttggattgcttctggtgaatcattacgcttttctaagcgactaattaaagctgttgcttccgagaccgttaaaaataagacggttacttgtttgccaaaggtttccagataggtctgagcccctttggtatcaaccactaaactgatcaatggggacttcgcccaagctagctcaagcgcttcatgtgaagaaccataatgatagcctgaataagtcactgattcgattaaatgcttctgtgcaagcgatgactcagtctcgaaatagtaatccacaccatcgacttcgttatgccgtttaggccgcgtcgtatgggttacgacttggggaatctgatacatttcggttaaccaatgactaaccgttgttttaccactaccggtggcgcctgtaatcactaataactgtttttctaccatttttatcccacttctcatctattttaactaaaaaagtttgacccttccttctcagggagagccaaacttttttctgtttaatattaattgcttaactaaatccgacgaccaaagtcaggtttgtaatattgcattgacatggttgttacgctttgaccaggtgccggtgcatgaacgtatgaaccgttaccgatgtaaattccaacatgatgtgctgaaccaacgccaccccagaaaacaaggtcgccaggttgtaattctgataatgacacttgtgtcccaagcttgctttgttcttgtgatgtccgtggtaagctgataccagccatcttagctgcatacatcactaaacctgaacaatcaaagccaccaggttgtgcaccaccccatgcatatggtgtaccaataaattgtagtgcgtttgacactaatgaacctgtgttagcaactggctttgttgttgcttttgaggctgagttactgttgttacttggtgttgttgcaccagtattattgtttaaaactgattctatcttagctttgtctgatgattcgttcttaatatcgcttgatgttgattctgattttgttgccgtttttggtgcttcagctttagcggctttgtctgcttccgcttgttgtttagcggcttcaacagcggctgccgtttgtgaatccaattggctttgtaagttagctaattgtgttttatgaccttcaacttctgtttcaaaacgcttttgttctttttcagcgtcatcttttaaagtcactaatttagcttgatcagcttctaattgtgatttagttttaactaaatctgcctttttagtttcttgcgttgtttttaaagttgccaatgtactttctgaatcactaacagctgtcattgcttctttgctggcttggtttaacttaccaacaactgacgcacgactcatcatatctgagaagttatcactattgacgataaaatcaacatagacgttccctgagacgctgttacccgcttctttttgaagtgaaacagcttgcttcttcatcacgctcttacgggcttgcacttcagctttagctttttcaattgattgatcaagtgcaacgatttgttgatcagttgacttgatatttgctttagcatcatcaatggcaatgaccttgttagaaacttggctattgatttctgacactttattttgagcatcgtttaatttcgttaacaaagcggcattttcagcactagttttcgtaatggcagcctttgtatctgttactgaatcggcactaacaacacccacgctcatcgcaattggtgcactgattgataacatcgctaacgcactgaccattaacttacctaattttttcactttgtccactcctgtttttaatataattaactacttaataccgtccatatttcttatccgtttatcagtgtatcatctgactgttacaggactgttacaattaaattactatcacgagtcgatgtctgctatatcaatgtttttaatcactaacaattgctgaatttgcgcccattgcgtctgaccaattaagacggcagtttcatctccgtttgcgtcaactacttcataggataacggcttaacattcacctctttgacaatttgattaaacatctttttggcatagagcgcctgaatttttttagtttccaaaataaccacctcatcattcattttaattaagcttatcataagcctgtttaattgtgtttcaatcgctttcagcttaaaatgaaaccatcttctaggaaatggggttttaagatgcaaattacaagacatgatcaaccactcgagacaattgggacaccacctaaagtcggtgagcaattacccgcttttgaattggttgatgcagatcaccaaacacgcacaacccaacaattactgggcaaacgaacattgattagcattgtgccagatatcaatacacgtgtttgcagcattcaaacaaaacactttaatcaagcaattgatcaatttacagatatcaacttctacaccgtttcaacgaataccgttgaacaacaacaagcctggtgtgccgctgaaggtgttcaactgatgcaactcctctccgatgaagccttgagcttcggtaaagccctcaatttatacgttcctagcaataatacgttgcaacggtcaattatgattgtcgaagcagatggcacaatcagctacgaagaattaatcgttgaacaaactgacgaaccaaattatgcagcggcactcgaatttttaaaatcagctcactaattaagtgaatccgctcaaagccacaccaatgttggtcgtggtttttttattagcctaattgttcaacctatcacgtgagcgatgtgataggttgaacaatattgctttaccttgatgcttggcgtattatacctataccagttacttaaatttaaacttgaaggagtcgcaatgacgacacttagcaacgatctttttcagacctttaataaagtcattcaccactatcgccattattacggtatgcaattttcatcgcaccataaatctgtcagtcaaattcgcattttaaaactactccatcaacaaaatgggcaaatgcaaagcacgcttgctcaaacgttggcgattcggccctcttcgttgacagagtgcctcaataaactggctgctaaagactatattcaacgtcaatctgatgaacatgacaagcgtgtgactcacgtttttatcacaccagctggtcgtgcgattatccaagaagcctttgatggccgcgatgagtttacggaaaccttatttagcagcctttcaagtgaagaacaagcaacgcttaatcagctgctcaccaaattagaacacaccttatcagatactcaaaatttcgactttatggctgaattcaaagaacgtttacaccatactaaactttaaaaaagcactattttaggaggttctcatgcgtaaaatattagaatattctctggcgggggttttatcttttctctttagtagagccttcattcatcgcatcgttttacccacactttggggttatccccgcttaacccgtgtgatggctagatttcctaagacgaccgtcctattaattctctttttgaccctcgcgctctggttaggctggattcagtgggacttaaagcgcctttcaccgatttacggatacttgatttatagcgtctatctcctgctactcttcatcgtattgttcacaaaagccagtgtttaccatgctgtcagcctgaatccatttgattttattagtcatgatcgccgtacaattctggaggccctattaaatgtcatctacttcatcccactgggcggtctctatagtttaaaagcggatttcactgaaaccaacattatcgcattgcttaccattttaggaattgaaattcttcaatacgtcttttacttagggactttcgctatcagcgatatcattctcaactgggtaggttgtctaatcggctttactttattcacgattggcgcccgccatttcaaacaaacgattaaaactaacgcataaaaagagcgcaggacaaaagttattttttgtctcgcgctctttttttagactagtaattgttgataaatttgcttactcatcgtgaccaacgatggtgttgatttatattggttggataataaaataatccctgattcaccattttgggacatctgaacatgactttcaaagcctgcttcaataccgtgactagtgaaataatcgcgataattataaacaccacctgaatattggccattattggtgtgccgtaattgttgtaagtacttcgacttaaagaccttaccttgcacaattgcctcttcaacttgatacaagctgctagcagtcgcatagagattacccgtcccaagttcccgtgtatagatataggccgggtcttcaatttctgcaccgtatgccccatttttttggtaggcataagccgtcgcatgctgtggatccgaaaagtttggcatgaagttaaagacctgaacccccaacggcgtaataatctgttgtttcatcaaatcattgtagcttttatgtgtggcttgctccaaaagccccgctaacaagacataattgactggcgaataggcatgttggccaatctttttaacctgcaaatgtttgattgcaaattggagacgttgtgcatcagtttgaacaactttaggcgcgctcgtttcaaaaagccctgaacgcatatccaacatcatttgtaatgtaatctggtttgctttgggaatttgtggataaaagcgactgagatgatccgtcaatttcaactgaccattttcaacagccttcatcacgagtgccgcagtaagtgacttttgcaccgagccaatttgatacgtcgttttgggcgtcgtaaattgttcgctattcgcgtaaccacggccaccttgataaatgacatgattatggcgaacgattaaaatggtgccactgaaattattatctaataattcttgttttaaatatgcctgctctggcgtcgttaattcattaaccacccgatcatcaatatcatttttattgactttggcacgctgaatatctaactgctttttggttaacttcaattgcatttgcgtattagccaatgcttgcccctgtcgaccaaattgtcttctaaaataaaaggtcagactgacacctaatactaaaacacaaatcgtcaaggcaatattaattttctttctcttcatccgtttcactacctagtgctagtcttcccttcttgagtactgttaaatctgtgccaaattgataataaagcgcttcaccgtttgcgacttccacgccatcaatggcctgatctgaaatttgttcgataaccttaattaaggcacgcaaagtcgagccatgcgcaacaattagctgatcttgcccagcaagtaaccccggcaccacttgatcttgccaataaggtaataaacgttgggtggcttgcgccaaactttcgccgcgtggtcgactcttacgtggcactaagcgatagcgacgcgcagttgatgaccgaattaaaagtggcggcaccgctgtataactgcgccgccagcgcgctacttggtggacaccaaaaacggttctcgtcgtgtctttgttcaagccacgcaaagcaccgtagtgtcgttcattcaagcgccaactcttagtcattggtagcgccaattgatcgagttcttctaaaacaatgtaactggtcaaaattgcccgtttcaataaagacgtgtgcacgtggctaaattgaaagccagcgtcttttatctgccggccaacttgatgggcttgctgtcgcccttttgacgtgagcgccacgtccgaccaaccggtataggtcttcagttgattggcgacactttcgccgtgtctaacaattactaaattcgccatttttcaaactcacttttcacgtaacttaaggcctaattcaatcgaccgatccactaagacggattgtgaatcaactactggaaaatcatggtcaggtgcccattcttgtgccagtgacaattctgtacaacccaaaataatcgcgtcgcattgtgtttgcatctccgctagaatagcatgatatttctcaggtttcatctgtgattggcccttgatatcattgaaaatcaaatccatcgtccgttcttgcaaatcaagactaggtttcaccacttcataaccttcagctaacaatgcttcatcataaatcccatcagtcacagtccctttagtacccaaaataccgattcgtttagcatctggataggttgtttgaatactcttgaccgtttcccgaggcatatgaacaatcggtgctgaggcagctgcttgcaagtcgtcgtaaaaataatgcgctgtgttgcaggcaatgacaaaaaaggctggtttcaaaagactttgttgttgaatatcttccaataaatcaggttccggacttggttgactgtggtccattaagtacgttgaccgatcaggaattgtcgcgtgattaaccacgatatagttcaagaaatcctgatctttagtcgttggtgtccgttgattaagaagtctgatataactttcggttgcagccgttcccatgccgccgagcactgtaaaaaactgtttcatagtcgcgatcaccctttattttctttaaaataacgtgcgaagttcttacgataattgtgtaacatccattgtgttaatacccaccgtttagggttgttatcttttgcatattggaaagttgtgccgtaacgacccgctttgattaaggctaaagcctttgtcttatcttcgttatcgcgcgcgtatttttcaaaaacaccctttgaaacacctaaccaaagtgctgcttgatcattatctttattggcataaaccgttgcttggtccttcaattcgccagtcacgtaatccttaacaacccattgtgccaagttgtaaccatttaatgtgacgaagaagctactccggccttgacgtaagttgatttcaaataacttgtaagtttgatcgcgttcatcgtacttcatatcgaagttggcgtaacccgtgaacttgatggcttccaagaaagtttgaatttgcttgtagattgtttcgttgtattctggcatgatcgccacgtaattcccgattgctgatggtgcgggatcttccaataatggatgacctaaacacatcatcttcacttggtggttttgatcaacataggcgtttaaaacacgcatccgactgtcatctccagggatgaagtcttgtaaaatcaagtctgatgtgtagccattgtcgtagatttttttgataatcatatcgaattcagcttgtgattgaatccggaatgcttttttacgaccttcaaaatgaacatctaaccattcaactgagttagcgggttttaacgccactgggtagccaaaaggttggtccacttgaccatcaagcaccatttgttgcgtaattgtcttagtcttaggataaggcaagtcgaattcttcacaaacttggtagaagttttccttgttattcaaacgttttaataaatcataatcgatgtaaggacaaacaaaggctgcttctaattctgttttatgtttagcaattaattcagcgtacccatcaccacaaccaattaaaatcactggttctgtgtgtgtttgatattttaaaattaagtcgcgcatcttttcaatgaagacgggatcttcactgaaaccaggtgtgatatccacatccacgatttttgtatagcgcgttggggcaagctcagcaccggcataagcttgcacgggttttcctgttaattcatagaatgagcgtgccattccataaacattaaaatcactaccgagtaatacgggtgtaaaattagcttcaattattggcattactttcacctcttagaaataatgcctctagtataccacgaacgccttgtcgagagacatcctctttaccttttcataaatataacagaattgtcacgctagcttcaatttcgttagttcgttcgatggtgagaaccacttgtcgatgctaaactaaatttatcatctacttggagggattattatgtcaaagaaagcgcgtctactcgcagtattagttggaatcgtatgtgtcggttacttaatcgcaagccagtcaatcaacgatcaatctgcggcgcaatctgatcgccaagaacgacaaagcatccataagatggcccgttaatcgttaagtagctatacgactttgttgtcaccaagcatttgattgtagtacaatgaaggtactgaattttaaggatgtgccaaaatgtcaaataaagcaaaagaattttggaaatcaacattacaaattgtcctattagccgctgtcatggtgggtatttcacagttattattaaccttcgtgatttccaatgaacaagtttttggaccttcaatgcaaccgaactttacacaaaatgatcgcgttatcgcgcttcgccacgccaaactcaaacggggcgatgtcgtcattctcaaagcacctgatgctaaaggggaattctatatcaaacgaatcgtcggaatgcctggcgataccgttcgattcgatcgcgaccagctatacatcaatggtaaaaaagtcagcgaaccatatctcaaagcctataaggctgatttttcaacctacctcgctggttcagattacttcacacttaaccccaaaacaaacggtcccacttttgatctcaaagatgttttaggtcaaaagaaggtcccagcgcatcactacttcgtcatgggtgataaccggaccgtttctaaggatagccgttacaaagaagtcggcttcatcagtgatgatgcctcagcttataacgggattcaaggggtcgttaagttacgctactggccaattacgaaatttaaaatctattagaagtgcgttgtcagtggttagcttttgagcatttgcagaacttagcgaattggtgatggaatcaccggttcgataagtttagcaaagcacagaaagctactgacaaaagcacgttaaaaaagaagtgcgtttaaaacggtttgactttgagcattagcacagctcggtgaataactgctgcaggcagttgtttgacgagtgacgctaagcacagaagtcagtttcaaatatcaaaaagaacccggacaaattaatttgtccgggttctttattttttatagataaacactgatgccgagtaaaatcatagctaacagaccgattgctaacatcaatggtagcacaaacttcaaccatttatcgaacgtgacatggaccatcgctaacgatgctaaaaccaagccagttggtgtgataaatgacatgatcccttgcccccagttataggcactgataatcacgtcgcggtgaacgccaaccacgtcggccaacggtgccatgaccggcatcgaaaggacggccaagccggaactcgatgggataaagaatcctaataggatgaagacgaagaacatcacggttgagaagatgaccccgctcatgtgtgaaacaccattgctgagccagaaaagtaaggtatcactaatctgagcttgttccatgataatcgtcacaccccgtgcaagggcgatgaccaaggcaacccctagtaaatcagaagcgccagccacaaattcacctacgaagtctttttcagacaagccagaaatgaaggctaagataaaggtaatcgctaagaataaggccgaaatttcattgaagagccagccccattccttaacgccaaagaccatgatgacaaaaccggccgcaaagatgattaacattaatttcttccggaaatcaaacttaggcacgacgttattttcttgatcacccaagaaatgagcttctaattctgctttttgactataaattaatgatttttcaggatccttcttcaccttttcagcatagcgaatggtatagaagatacacatcgccgttccgatgacgagcatcactaatctgaggcccatcccttctgtaaaactaatcccggcggtgttcgacgcgataacgactgagaacgggttcaccgttgacgccattgtcccgattgaactacctaaataaatcgcggcgattgcgaccagcgcatcgtagccggccgccatgaaaatgggcactaaaatgggataaaaggcaatcgtttcttcagcaagaccaaaagtggtccccccgagtgcgattaaactcgtcacaatcacgatcaaccaagcttcacggccttttaacttcttagatagggcagccattccggcagcaaatgccccggttttattcacgacgcccacaattccccctaaaataagtacgaaggtaataatatcgattgtttcagccaagccttgaataggcgcattcaagaactgcttaaccgcgccaaaaaggccggtattggcttttttcaaatgttgatacgtattcggaatcgctacgggtttgtatacggagccatccttaaatttcgctaaactcgtattaacatggtacttcttgagtgttgcttgcgtcccgggagccgttgattcacggccggtcgggctagtaatggtaaaattattgctttgggtattatattgtaaactcgcgtatttcccagacggcatgaaataggtcaaaatcatcactaataataagaccaataagatcaccgtataggcgcttggaaaagtaaaatgatgtcgtttcttcgttgccattgtcgctcctcctttataaatcactggtatacctctaatactagaagattatgacagtgtcgtcaatcaattacccgctttatttaaaccgctttctatttttttaaccttgggtttgcgcttaatctgtgctagaatgacacaaagcaaaataagggacgacagagagcgtcctttttggaggaaaattgaatatgaaaactatcacggcacacagccaacatcgattaacaagctaccagtctaaggtggtcgcctcaacgaccgccgggttcggactcgaaaacatggacgttatgttcttgtcttttgccttatcgtccattattgctgagttacacctcagtggcacccaagcaggactgatcgcaacgattactaatatcgggatgttgttaggtggcgttttttttggcgttttagccgatcgcgtcgggcgcattaagacgttcacctatacgatttttatcttcgcctttgccactgcagcaatgtatttcgcaaattcactcaccctcatctacctttgtcgctttttagccggaattggtgctggtggcgaatatgggattggcatgacagtccttgcggaaagctttcccaaaaaacaactcgggcgcgtttcatcatatgtcggtgttgccggccaattaggggcgattgccgcctcacttttagccgcttgggtattaccccaatacggttggcacgcactatttttattcgggctattcccagtgattatcaccttcttcattcgccatcacttagtcgaaagtcgcaactttgacaccgaccaagcacgacctaaaggccaaattaaagccctcttcaaaacgcgtcaattaacgcatcaaacgttagctttaatggttatggcagtggttcaaatcgctgggtacttcgggttaatgaactggttaccaacaatgatgcaacaacagttacacctcagtgttgctggctcttccacctggatgctcgcaacaattgtcgggatgtcagccgggatgctaacctttggttggattctcgatcgcatcggacctcgcgttgcttttagcagcttcttactcgcgtctgcagccggcgtctatgtgttgaccttacctaaaaatatgaccggcctcttgattgtcggcgcacttgttggctatttttcaaacgggatgtttgccggctacggagcgattgttagtcgcctctaccccgctgaagttcgggcaactgccaataacgtcatcatgaacgttggtcgctgtgtcggtggattttcaagcgtgattatcggctggttactggatcactattccattctaaccgtcatgttattcatctcgacgctttatttaatcagcttcgtcgtgatgctcaccgttcaaaatttaaaagcggaacgctattttaaccatctgtaaaaaaagaaagtgttatataagtcgggtatatcctgaggattaacagagagtggcgaatgattgctgtaagcaatcgtttgacattcggcgttaaccacaaggatatgacttatataacacgtttagactataaaaattcgggtatcaaaaaaggggttgggacaaaaataaattttgtcccaaccccttttttattgtttaaaacgcacgcttatttttataaactgccgccgcggacttctgctatgttgccgactatcgtaaacgctagcgggtccacttcgtgaattttattaatgatgtgttggtaggcctgattttcgaccactaacatcaacatttgcttgtcttcgttagagtaaccacctgttacgtcaaagattgtcacaccgacatcagcttcttccaccaaatgttctttgatagttgccaactgttcgttactcatcacgtagagcacctttttccggttgaggcctgtttcgatgtaattcatcgtaatcaatgtcagaatcgatgaacaggttgctaacataaaggtttcaaaaccagaaacaaaaacattggcaaaacaaactaataaatcaacgaccaacaagcttaatgctggtttgatattaaaatacttcttaaaaattaatggtggcacggttgaaccgccactagatgcatcaattcgatataacaaggcgattccggcagcatataccacactcccgataataatcgccaacagtttatcttcaaccaccatcgcctgcggagtgatggccaaacaaactggtaacataaaactaccaaagaggattcttaacgtggtctttttatcgaggagaaaataagctaagatcagcatcccgatgttgatcactaagaccaccgtcgaaatccgccagcccattaattcctctaataaaattcccacaccggttgccccaccggctgctacttcgtggggggcaaagaaaatttgaatcccaatcgcaattatttctaacgcaattaagattaaacccatttgcagcatcgtctgtttcaaatttgataaacgcatcgcttcactcatttctttttttggattgttaccataagtatatacgaatatcaaataatatgccacttggatgcttacttacgctgattgggctaatctggctaacttacgagctgtattcgcattacgaatcgtcaaccattgataagcctcactttcggttaccgtggcccagcgtgtacgtccataagtcttaatcggcgctgaccagaaaataaactgcccgaaaatagccacttgttcatactcgggtttactggtgcccacttgttcgctaagagatcgcgcggtttgcggcgcaattgcaacaatcagattgtgcttgctgttgggatcagtcccccaccaattcggtgcttgtgcgaccgcagtgattaaggcttgtgccgtgacaattgcaattcggaccgaaaagccaaacgtcgtggtcatcaatcgatcacaaaccgccactaacgccgccagttttgtttctggtgtttcaaataatacattaccactattaatatacgttttaacgtggttaaagccggccgcttcaaaagctgcttttaacaaactcatcttaaccattcgttgaccaccgacattgataccgcgcaacaaggcaatatattgcatccctttttcctccgctgaattccatttagcttatcataacttaaattgataattctgactatatagagagaaccgttcggcccgataagcataaccaattgtcgtaaaattggtaaacgtcaaattatagacctctttgttagttttgggatcgacctctacgatatgactgatcttgccttgatcgttaaagtcaaaatcaatcaagtaattaccgttcgttaatttgcgtgtacagccgattacttcactaaaattcgttttacccaatgttttaccgtaggaccaggtcttcttaatcgtcttatcctgttcgtcgattaagtagctgacaccctcagaatatttgccagacgtcttctgatcgccatttgaaacggccatattattgttgaataacactagttgtttctggtccgcttcgccggtcggccaaattgtggcggcgtgttgcccacccgtaaaggttgtttggctgtcggcagctttcaacaatagtttgcggtacttcaacggccacttgctagccgatttactactgaataaccacttaattttagatgtcttgtagtctagtttcatgactaaatcctgattacgacttgaaatgacgatactatcatcgctggtatcataatcgatcgaattttgatggaaccaatctaacttaccatcagagcgtttagttgccttataggtctcatagagcgcagctggtaaaagtcgcttcaaatcgatcactttgaccactttccccgtctttcgggataactcgaccatcgtatcctcaacgtattttgaaccaccatccgaaactgtcagtaataagttgtggtttggtaatttaatcgcatcatgatgaataatggtggtttcggttttgtcgtttgctgattcattgttacgcgtttctgtcgagaattggtattcgcgataaacacgtcccataaagtcagtttccaacaaatcattgtaaactaaatctttattatcgggtttcgttaaataaagaagatgtccgttgctgagtactttaaaaatatgttggacatagttggttgagtaccaccgaatttcaccatccgcatccacaccaactggatattgtgttgaacgcacaaggaaggttagactactattgccaattgacatctgcgtcttatccgcttttttgaccttcagtgacatcgaagcaattgcttttggtaaagcggcagttttgacaataattgtttgatacgtcttatggcccgcttcatccgtcaatgttaagcgcactttattttgatagttcgcataaagccctaaaaccgaaatagtatgactcttggtgtaggttttaccaacttcactcttaatacttgttttagccgttttccccaccacttccaccgtgaccttagtcgcagtgtcagttttaaataacactaatgcactcagtggtgacgtgccataaggattgactttaacatacggcttagcgctcgtatattgatccgagttgagtgcttttttataagtcgccgttaatttttcctgacgcatttaccgcgtcttgattgtctgactaccaatgttcttgataatctgggacgtactcaatatattcttgttaaataacgatgaactgcctactaatttaaaaaggagtagtcccgctaagataacgcctagcagaatgacggccccttgtttcagacgttttttcatacacaatacctcgtaatctgtttattagtagtatattagcgtctgtttgtgaatatttaatgattaattatcgagatattttcggaaaatatggtctttgtaaatagcatatcgcgcccatttagcctataataaatagttatggatttacaaaaaaatgacaaggatggctagcaatgacaaatcaactaaagccacaaaacatcgctaaggggatgttttgggcaactatggcttctgcactttggggtgtctctgggacaatcctcgagttcatctcgcaaggacaaaaagtccctgcgacctggttcttatccgttagaaccttaggtgccggtctaattcttttactaatcggtgcaattaagtttaaacaagatatcttctcaatcttcaaatctaagcgattgacagcctggttaatcgcctacgcgctctttgggattatggggaatcaatataccttcttcatgagtattcaaactgggaacgccgcagcggctactattttgcaatacttgagtccacttttcatcgtaattgggacgctcgcctttgtgcgcaagtggcctaatcgaattgatttgatttcatttgggattgccttagtaggggttttcctttcaattaccaaagggaatattcatacattgacaattccgtttaattccttaatctgggggattttatcagggattaccgcagcgttttacgttgttttaccacgccccatcgtcaatgaaaagtcaccgattttagtgcttggttgggggatgtttatcagtgggattttattcaacatcaaccgcccattctggcaagcaccacctcatttaaatggttctgggattcttgcaatcttagcggttattttaatcggaacggtttttgcttatctttgcttattacacagtttaaattttgcaccatcaaccgtgatcagtatcgtggatgccgtgcaacctgtgatcacttttgtcctcagcatcattttcttccactcaaaattcagttgggttgaaatgagtggcgccatcttggtaattcttgcgatttacatcttacaacgctaccaagaagcggacggacaaccactcgcctaatcaaaaaagagtgcgtttcaggcggttatatggtggcggcttagcctaggctcgtgaagaagcgacgcagtcggttgtttgcgagccgtagctaactgcaacaatatgcctgaaaaagcacatttccaaaaagagtgcgtttgaaacgatttgactttgagcattagcacagctcagccaatgactactataagtagttgtttgacgagtgacgctaagcgcagaaagttactggtaaaagcacgtttaaccaataaaaaacatctcaatattaaaaaaagggatccgacaaagttattttgtcggatccctttttattacctaattaattgttaatatcgggtcgaataatcttaattcattacaatcaacgtttcctagatcagtaatggctaaatcaggaatcgctgtgattggtaagaaggtcatataaaacatcggatcgaccacttcactcccaatagcttggctggcttttaaaatgccttcttcttgaacggctagttcggccggcgttacgtcgctgacaatccccgcgattggtagtggtaagaaacttaaaatctgaccatcagccacaacgacttggccaccatcgcgttcaatcaacgtattaaccgccaaagccatatcgtctggattaacccccattacgatgatgttgttatcatcaggtgcggcagtcgaagccatcgcaccttttttgagggtccaacccgaagtgaaccctagtgactggttgccatttttaccaaaacgttccaagacagaaatcaacgcgacgtcttttgctggatcgatttggacgatgccggcttcaactgctaacgtcttagacttagcatggcggacaaaaggcccttcactggcaatcgtttgaacagtaacttgacttgcatcggctgctacatgatattcgaagtcgctggcttggacggtctttctgataaccgtgttagctaaactagccgggcgaaccgggcgttcaatactatgattgatgtgcccgtccgttgccaccggttggcctttagccaagacgcgtgtaatcacaaaagcttccaaatcagaaaccaataagatatccgcattacgtcctggtgcgattaagccgacttggtcatcaatacggtaggcttcagcactattgatcgtcgccatttgaatggccgtcattggtgcaaccccagctgcgattgccaaacgtactaaatgatcaagatggcctttattgacgatatccattgcgttaacgtcatccgtacaaaagctgacgtgccgtgcaatctgaccatttgtttcagtgatggcgcgaatattttcggctaagaaatgggtgacagatgattcacgaatcacaacattgatccctttgcgaaccttttccaataattcctggtggtcgtaactttcgtgatccaccctgacaccactcatcaaatattcattcaatttagtacctgttgccattggcgcacagccccaaacgggtacgtggttatcttgggcactcaataatgtttttaaggtatcttcatctagtgtttcaactgcttcacgcaccgtttcccaaacgccgtaaacgtcagaccgtttttgtagttgcgcttgaaccgttgaatcaatattatcagcgatggtagaagccggaatcgtgtaaggggtcttgaagggcgcgccccaaaaaactcgcattggtaattgatcaacttctttaaaaatttctgataaaccatcgacaccaatcactgaaatatattcatctaaccctgagataatactggttgtcccatgtggcacaacggcttcagcaaaactcgtcatacttaacttactacattccacatgaatgtgactgtcaatcaaacctggcacgatgtattgttgcttagcatcaatcacacgcgttgcagtcccttgatatgctgaaacatcgggatccaccgcgacaattttaccttggtaaatagcgacttctgccggataaatttcggcagtcatcacattaactaactgaccattcttaataatgaggtctgcgggccgtttagcacccccagcttgaattaattctttaaaagccgttaagcgatctgacataatcatcgttctcctttatttcggtaagatattaatgacatacaacaagataacaaaaacaacgaataaagcgtacatggccggatgaatttccttgcgccgccccgcagcaagcattgtcaccgggtaaactaagaagccaaaagcaatcccgtaagcaatattgtaagtcaatggcatcgcgatgattgttaagaaacttggtaacgccacttcaaagcgactccaatcaatcttacttaatgagcttgccattaaaacaccaacgataattaaaactggcgcggtcacttgtgatgtgacgactgtcaacaatggtgagaacaacatcgaaaacccgaacaatacactaaccactaaactagtcaatcccgtcttaccacccatggcaatcccagccgatgattcaacataagcggcagttggtgttgtgcccatcactgaaccggccatcattgaaacagaatcagccatcaatgcttggccaatgcggggcattttaccatttttcatgaagccagcttgttctgccaaaccaattaaagtcccagcagtatcgaagaacgctaccaataagaaaattaaaacgaccgcccataattgtggttgattgatatcacctaagtgttggattcctacgccaaacgtgggtttcatgctaggggcaactgacatcaactttgctggtaagggaattaattttgtcactaagcctaaaatagtggtcgcaatcatcccaataaagatggcaccatttacctttttagccatcaatacgccggtcacaaccaacccgaaaatcgtgagccaagttgtcggcactgtgaatgaacccatttggacgagggttgatttgctggcaacgactaaaccgccaccttgtaacccgacaaacgcgatgaacaagccaatgccggcggccatcgccagttttaagtcatgtggaatcgcgtcaataatgtattcacgaaccttgaataaggtaatcaccataaaaatcaaggatgctaccacgacaccggccatagcggtttgccaagaaatccccatcgcaatcacgactgaatacgtgaaaaaggcattatcgccaagccctggggcaatcgcgattggataattggctaaaaaggccattaataacgaaccaacaattgctgaaagagcggtcgctgtaaagaccgcgcctttatccatgccggcttcgcctaaaatctgtggattaacgaataaaatataagccatcgagacaaatgttgtcagtcccgcgaaaatttcacgtttcattgttgtaccagattcttgtaacttaaacatgcgatctgcgcctgcttgaatccctgattgcttcattggtgccatttcccaatcactcccgtttatcattaataacactagtatgccaaactgcatttaattattcaagaacaattttattttatttaattaaatagttcgtatttaacttgaaattgcattttttttaagttatgctagtgccaagttattaattcattaggaggcagattttatgacacaattggcaacccgtgactttattgatagtttacctaaagcagaattacatcttcacttggagggcacattggaacccgaattgaaattagcccttgcgcaaaaaaatggcgttgatatcggccaaagtacgattgaagaagttcaagcaagctacaacttcaattcactcgcctcatttctcgcggtttattaccccgcaatgaatgttttacaaactgaagatgacttctaccaattagcgttaacttatttgaaaaaggcccatcaagaaaatgtccgttacgccgaattatttttcgatccccaagctcatatgacacgtggtgtggcttttgaagctgttgtgaatggcttttatcgcgcttgtatcgatgcccgtgccttcaacgtcgatgcccacttaatcatgtgtttcctccgcgatctttccgcagagtcagcgcgtcaactactagagattgctaaaccataccaagataagattctcggcatcggtttagactccgatgagcatcacaatccgccattgaagttccttagagaatatggcgatgcggtcgctcaaggttatcggattacgatgcatgctgatatcgatcaagtgaattcaatccaacacatccaacaagccctcgaaatcattcgcgttgaacgcctcgatcacggtaccaatatcgttgaaaatccggacttggttgactgggtcgaacaacttaaaatcggcttaacctcttgccctctttctaactgcctcgttgccgatgatatgaaggatcgagaagttcttgagttgatcgatcacaatgttaaagtctcaattaattctgacgatccagcttattttggcggctatatcaacgataattacgaagccatcgctactaaaaatgatttaactattgaccaagtcgttcagtttgcaaagaactcatttgaaacagcgtggattagtgatttccaaaaacaaacctacctcgcagaaatcgacgcttatgtcgcagactacctgcaaaaataagatattaaaaaagcgcgttaagacaaattgtcttagcgcgctttttgagttggtgattatcttggcaccacatgcgtttcgatttgtggttcgccacctttgacagagccaaactttgaaagaaccgtaatcgtgccatccgcattcggcgtgaaagtccaaaaatcctccccttatgccccggagtaatcatgggccgtcattgaaccatcaggttgactactaaatgtcccattgtgaataacaatatactcagagccatcgaacgccttcttttcagcttcaatcgcttcagcctccgtaataggtttaattgcagattgcttagcttgttccgcggctttttgtgattcactggctttagaagctgccattgctgatgcttgttgggcagcagacgctgaacttccagctgccgcttgagctgctacaagcgcggccttttcacgagactcgctcatcgctttagctgacgcttctgaagcctgttttttggcgctactttgagcccgcaattttaattcactttgctttttagcccgtttttccgattgcgtcgtactgtgactgttgctacttgtcttcgttgaaccagcctattgcccacacgccgccaacaaaagaagcgtcgccgttgctaaaccaaccgttaatttcttattcatactaatagcccccaaataccttagttgagattactcatctcgataactaaagtatataaaattgacccgacataatatgtcactttgatggatataaaaaagaaccccagacaaattttgtctgggctctcaatttttcctattccactgtatcaagctaaaatattacgataatttttcatatactaatgatttttttagtttcccttaaccaaattcgattataagtatattctttaattattattttttcgtatatcatgtacgtacttctgattttttcttatttgattcataatctgttccagtacttctactttatatctactttctttcgataatattaattgcgctctcttggcataccccgtcattgaataatactcaccgtatcttcttggaataagatacattttagtagccaactgagtttgagttagattataattataatttttctttgtatgttctattcttttcttaaactgttcctgttttaccctcgaatgaatacttttaaatactttatgattatctttccaaacaagttcttttttattttcaggatttggaatagttcctcgtttaattttatctctatcattttctatacgtgtaaaaagatttatagcttttttacttttataatgaaatttatatatacttttatctctgatacgaacaacatctccgttaaaaataaatcctaaataatcgaaccaccggctattttttgtctcatctcttaattctattttattcgtattatttatattgtaattaaatgtctttgttttatgcttttcaatttctaactttgtttccttcttacttagagtccttacagtgttaatcaactcttctatatcaaattccgactttttatctttcggtataacaatcacaaaatcatctgaatatcgcctatagagtcccatttctttcgaaataatatgatccattttcttatcgaaattaatcatataaacattggctaatactgcacttaatgatgtcccttgtggtattccaatttgatttggtccgtgaactcttagccctcccttagttataagtttttttatctctttacgactatctatatagggacgttcctgattatttttaatccctgctttttttagcgcttctacgagttctccactattaaccgatctatatcgagttaaagatttaaacaccgcattccaatctttacttaattcgtccacgtctaaaacttcacaaagattatttcttagtgtactatatcttaaattatcaaaaaaacctttaaaatcacctttaattatccaagattcatttgatttctcaataaaatcaaaaacttccttagctgcatctatattcgactgatgtaaacttttacgatacgctgtcggaatatgctctatattattgtcagcgagatattgttcgtatttatagtttaatttttctgaatactttacataaattaaagcatcatgatgtgcaacaagtgatatcggtcttttcttcttctttaaatgcgctctcaaatagcccttacttctatgatatttatttaaattctgtgtataaacaataaatggcaaaaatctgtatctagccacttcatccggtttatttacaattgagtctatgaatttaagcgctgatttttcagtcaacgttgcatcaaattgtcgataacttttattcagtactctttcgtatattaatagctcctgtttcgtagtatccataataccctcctacaagctaaaaaggcctgcgattagtcgcaggcccccggaaatcgttcacttttttgacggtcagaatcaaaagcaaaagtgacgtctaaaatgctactatattcagttagcgctccggtaattcctctatactatttagctacacaataatatagcgctgaccgtaaagaacaattgttctttacgtaagttacaataaacttaaggtcaacttcgattatgaattgtttcaattaatattaatttcaacatttcttgtcgttgttgtcgtgttctctcaaactttcaccgtttcagttgaaatagtccttcgagaaatccttatgaaagaggttgataaattgctttatctgtgttactacctcgtttaacactacatacgttattgtatacgagtctcactgataaactcttatgttaagtatagatattataccacttttacaattgaatttcatccttaatagttaacatttcaaaatggagtactccattggcttttatttatgatacggcgatccctggttaatcataaacgcccggtagatttgttccgttaaaactaaacgcatcaattggtgtggtaatgtcaatttgccaaacgatagtgcgtcgttagcacgtttattgacggcatcacttgttccgagtgagcccccaataatgaaagtaatatctgatgtgccataggttgccaaatcttggatttcttttgcgaattcttctgacgcacgttgtttgccatgaatggctaacacaatcacgtgttccttatccttcaccttagctaaaatccgttcgccttctttatctttaacggtcgtcatttcagcctcgcttaaagattctggcgccttttcgtctgccacttcgatgatttcaaatttacaaaatttacttaatcgtttggcgtattccgcaatgcccgcctttaagtatttctctttcagtttcccaacagtaataattttgatattcataacgtcctcctagctaatacttctattttaggcgaaattgatgctaaaaaaaagctattcacagtaattcaccgaaaagtacatgttatccacaaaagttgtccacatatgcacaagtgttcgtcccaagtcttgtggtttaatttttttgaaccactaaataatcgaatcacaatttttagaacactttctgacaaaaaaagttatccactgatttttaattgttcgcactgttgtgtatccattttcaaacgctttagaatcagcatttaggcccactttattttaattttaaaaagttatccacttttcatttattaacttgtggataacatcggggcttatttttccgtgttatacccacaatccacagacttatccacaagcagctaccattattgctttttgactatccacattgacttttttaaaacttaacaattcacgtccttggccccttgacgaacttctttttaatttgcaagcaaaaaaaaacactcccggagaataccggcagtgcttcttcatttttaattagcttgtttcgttgttgctgtgttatctgaagcagcttgtgtcaatttaacatttgcttttttcaaactgccattgtgataatactgaatttcagtggtgctattcatcgcataattatacaaaatagtgtgtaagtcagccacacttgaaacagtcttaccacctaggccaacaatcacatcatatttactaatgcccgctttcttagcaactgaatttccgctgacagaagcgacaactactccgctgttaactgatgatggtaacttaaggactgatgattgttgggctgatgagatgttagtgagatcaatcacactaatcccaagcgctggtctaacaactttcccgttagccactaattgattaataattttaaccacttcgttacttggaatggcaaagcccatcccttcaacagaggtttcaccattcgaagctaatttcattgaattaatcccaataacttggccggccatattaactaatgggccccctgagttcccagggttaatcgctgtatcggtttgaataaccgttgcctgaccagttgtttcatcagtcacatcaattgttcgcttcttagctgaaataatcccttgtgtgaccgaagttgcgtattctgatcctagaggcgacccaattgcaagaactgattcaccagctttgatactgtctgaatcaccaaaagtagctgttttcttcactttggcgccatcgatttttaagaccgctaaatcagagattgcatccgtcccgactaaagtggcttctaattttgtaccatcactgagaataacttcaactttatcagaatcggcaaccacgtgattattcgtcacgatataagccttgccatcttttttctcgtagattaaaccggagccttcactagattcttctaaatcactgctattgctcttggcattactcttattcccactcaaagttcctgaaccaaataactcactcaaatcgccagttgattgttgttgtttttgtaagttcacaactgaaacaaccgatgtattaactttttggaaagccgttgttgtctgagatgatgagttaaccttgatattactaatcttagtggctccagctttggtaggtgtttgtgtggtagtcgtgacatcattagcggcattacccattttcgaaaaaccggcataagctacgccaccaccaatcaacgctgaaataaccgcaataatcgctgttttcattaatcctgaattttgattcatcctaaatcacccaaactttctaattttattctgtttattgattatctctatcataaaatttaaatttgaaaaattcatgaacaagttacgaattttaaattgtttttatagcggtattttaacgcttttatgcttaaacaacaaataaagggtctgcaatcgctggatcggtatccaaaatttcaaaatccgtgccaacaccataatcatgttgttctaaaattgacgccaccgttaagtgggccaactccttcatattgttttcttggcttaaatgccctaggaaaacacgctttgtttgctgccccataaaagccattaaggctgaagccccatcttcgttagatagatgacccgtatcactaagaatgcgttgtttaagcgaccaaggatacttacccattcgtaacatttccaaatcgtgattacattccaccaaataagcatccgcattctcgatagtccctctgatttgatccgaaacgtaccccgtatccgttaaaattgcgaaggctcggttgttatgatgaaattgataaaattgcgccgccgcggcatcgtgtgaaacaccataactttcaacatcgatatcgccgagtgttttcgttttgcccatctcaaagacgtgcttatgttcatcagggacagtgccaataattgacgccatcgcatcccaagtcggttgattggcatacacatcaatcccgtaacgacgagctaagacacccacaccactgctatgatcgcgatgttcatgcgtcactaacaaactatcgacatcctttaaatcccgaccaatgctatgcattaaatcctgaacacgtttgccactcattcccgcatcgactaatattttttgagttggtgtttcaataaaagttgtattgcctgaactactgctggctaagacgctaacccgcatttcatctttttctaccatttatccgctatccccttggctttttcactgattcttatgatgttacttcgctgcgattctttattaaggtgccggtgaacgcattgatgcgcttaacgacgacgtttttggtactcttattttcaatggcgatttgccaggctggtacataaaccgtactgctattggcatctaataaggcgctatagcctaattgaacccacaaaatcttggaattattcggaatttcgttgtcagtgtataaatcgacaactgccccttgcgcagaaattttggtcatttctttttcacgtaaaatttgcaccttattgatgtaagtttgcgtatactgactgatttgcccgttatccaatgtaaaaattaactgcccgtgttcgtccatcatttgtccgcccggcaccttttgaacgtaaacagcttgttgattacttgataatgcttttgaataccggtactgatcagcctggtaaacattattgccatctttcaagaaagcattgatagccgaagatgcccgcccctttttatagctcaacggtttgtcgagtacgcttgtcagggttagtctagatttatcaaacgacgccgtctgcccggttaacttggcgctagcagcttccaagcccgtctgatcagcttgtcgactggctaaataataactttctcgtttttgattcgataaccgattaacggtaatctgatcatcctttaaatcttttaaaatctgactggtttgcgaacgattcgtaatagaagccgaattggtcgtttgactaccactaagcgacataaacaaatagatatcgagcgcaataaaaatggcgataaaaatcatttcaattctgcgaaaatccatctgtctaactcccttcggttagttcttctttctgtgctaataatgcgctaaggctacgccaaacacccttgtactgaataaaataagttggattaagatcaattacttggtcattacttgtttcttgcgtccactcatacccaacttgaatattatcgatattctctagtaataaaccatttttagtcatctgatttaagacggcttgtgtacttggtaaagtgactggtttatcacctgctggtacgggcacttgtaaactatagtttgagaaatcaacccgttgaccagttggcaataactgtaccttaacactcccaaaattggtttggtaaaagactgggaagccttcaacataggtccggtaggtcgtcgaattggtatcttcatcgtaactataaaaacgcatcccggatagtgaattgccggtcttcgataatgcttcaaaactcgtttcaaaactcttcgttaaacctgttggcgacttggtatcctcatacttcacatacgcaatttcacctgttttatgattaatggttagtcgcttgtataaatcgttattgtcaccatctgtatagattacgttgtccccttgttccttagcgtcaatgttatccgtattcttttgatccaacaaagttgtaatgtagtaattttcaggttgttggttcactaaataactgtacggtaaaagtgactgattggcggccacataaataaacggtttatgatttaacagactctctttaacgtttaaatgcacatctgaatgatccaagattcgtttgacctgcgcgactgaaaattgacgcatcgtcgtttgatagatcatgtgactcttatcgttcatcaacgtcaactgcggcttagtccccatcgtaatcttgattcgattaaaggtcgtattccggctcaattgattattactgtcgtcaaaaaccttcttaaagaccgcatacgaaatattgtccggatacaacaaggtcaatgtatcatcggttgtaatcgcctgatagtaattggcttcacttaacttagatgctttaaaccgtgctgatttagtcaacttcatggcttccttcagcttaggcactaagctttcctttgaattataaacgagctgactctgttgattagtccgccacaggatttgcgtgggtaaaaagatatcgctaatcttacgatcggactttcgactcaccgctttagtcgtcgtttgactatctgtccgtcgttcgtaatgtgtattattcgtccaaatcttccaggataaaataatacttaaaacgattgaagcaatcaggatgacccgcatcacaaaactattaaatttcatcccaatcacctccatcagaatcaattggttcgtatggtaaagaaatatagaatgttgagcctttaccttcttggctatcaacccaaacacgcccattatgtgcttcgataacttcttttgaaattgccaagcctaaaccggtcccgccttgtttccgagagcgcgccttatcaacccggtagaaacgatcgaagattttccctaaatctttacgtggaatccctaagccctgatcagaaatgcttaagatcacatgacgatgggtttccaataaacgacaagtgatgaccccaccatctggtgaatacttaatcgcattattcataatattatcgactacctgcatgaatttatcggtatcaatttcgacccataaatcccgcttggtgaagtcgcgcgtaatactgtattttttattaggatcatcagttggtaacttgcccgtccctctcggtgatgcattgttatcgtgttcctgatcccgtttaatcatcatatcaaaccgatcaagtacatagccaaagaattcatttaaattaacaaattctaaattcattttagctgtcccttggtccatccgcgataaactcaataaatcgttaatcattcggatcattcgatcagtttcttcttgcgtaaccttcaaaaagttcggtgcgacttcaggatcttgccaagcaccatcattaagggcttcgatgtaactccgaacactcgtcaatggtgtccgcaattcgtgagaaacatttgaaacgaattcgcgttgttcacgttcattcttttgttgttccgttacatcatgtaacacacacactaacccggtgatatagcctgtttctctttgaatcaatgaaaaatcgacatgcaaaatcaagtcatgatcttgttgatctgaaaaatctaggaccatcacttgttgggtttctaataaatcgcgaagtgtgtattcttcactaattttaagcacttttagaagcgattgacctaatacaccatcgctagtcacattgagaaagtcctgcccggtttcattaataatcgtgatgttacctcgccgatcagtcgcaatcaccccatcggtcatgtggctcatgacactgtctagtcgccgtcgctcggattcggacgcttcttgcgcctcttcgacccgaactgacaagttattaaccgcaatcgcaagttggcccaattcatcctgtccatagatgcggacctggcctgaataatcgccacgtgccatctgaattgcttgtttcttcatttcatcaattggacgcgttattgcccgggaaatgacaatcgataaagccatccctaataaacctgccacaagagacgaggtcaggaaaataaccgtgatcgatgaaatgcctttatagacttcttccatgctggcacgaatatagactgcgccaacgacagtattgctgtcaccgttgggatccgtcaacggttgaatcgccgtataataactgccctggctttcactataggcaacttcttgttccgtatgccctgaataaatcgcctgtttcacacgtgggttacgcgttttttggccaacagtactttgcgtattcagattagtgacaccccgaatggtccctttattatcaacgacttgaatctcagcagaattgcccatatcgccaataatatccttgatatttttattcgcattaccgctattgctcatcaattcattgcttaattgattttgaacatagggagtcacttgcaatgactgcttaaaatctttcacattttggtattccaattgcttaacaaacgaagccccaatcacctctagtgttactagcagcaacaagacaaaaacaattgcaatcttgaaatggattgattggaataaccgaatttttttattcatgcgttaaacttactcctgctcaggatttcttaaatagtacccaacaccacgacgcgttactaaccattctggatgactaggattatcttcaatcttctcacgtaaacgacggactgtgacatctactgtgcgcacatccccaaaatagtcataaccccaaactgtttgtaataaatgttcacgcgtcattacttgcccaatatgtttggctaagtaatgtaataattcgaattcacgatgcgttaattcaatcttcgtgccccgtttagacacaatataagcttctgggtgaatcgtgaggtcgccaatgttaatttcatggttttcctcatttgcttctttatcagattgactggttgaaccttgccgtcttaaattggctttaacacgagcgaccagttcccgattagaaaaaggtttcgtgacgtaatcgtcggcacctaattctagtccaatcactttatcaatttctgaatctttagctgttaccataataattggcatatcgtgtgatttgcgtacctggcgagcgacttcaagcccatcaaccttaggtaacatcaaatctaatagaattaagtcagggacaacttcttcaacttgttgcagtgcttcttccccatcataagccgtataaacgtcatagccctctttcgttagattaaacttaacgatatccgagatgggtttttcatcatcaactaccaatatttttttagccattttagtatcctccttggatgctttgtcttctattatactcattttaagaatgcaattcaaaatctggtctcgttttcaatcccgttataatcccgccattaacgatatttgatgggcctaattgggttgctacttactcccacaacaattttattgaaaaaaatcaaaaaaactgtttacagattgccaatccctatggtatgatatttaagtcgtaaggcatgagacattatatcacatgggtggttagctcagctggcagagcaacggactcttaatccgtgggtccagggttcgatcccctgaccacccatcaagtatacacgataaatagtcataatgatgcaattgcatcgttatgactatttttttatataaaaataaaagattatccacccagcaaagcccgcctatctgagaagataagcgggcttttgtgttaggccttcacggcacgacgtcttaacgtcgaaatactaattcctgtttttaaactaatctcttggatggttaaacctttttcaacatccttcagtgcgccttcaatttgctgatctgtatacttttgccgccggccttcatgatagagtgggttattcatccgcgcagcttcctcaccttcttgtgtccgcgtcacaatcatatcccgctcaaattgcgcaaaggcactcagcatcattagcattaggtttcctgtgggggtatcctcaatggtccccatatttaaaattgtcaccttgatattacgcgcaaacaactctttcgtaatacttaaagccccaattgtattacgcgcgaatcggtctaattttgtaactattagcgtatcgcccggttttaacttttttagaagcaacttaaatttaggccgatcagttgtcgtccctgtgaatttttcggaatagattttatcacaatcggcctgctttagttgctcgatttgtgtatctaaattctggcccatcgtagacactcttgcatagccatatttcataatagtgttacctcctaaaatttgatgcacaaacttattttaaaagatacgcgatgattagcaaggcttatatttacgttttgtaaacattccgttaaggaactatcgaaccacgtcgcctaaccccaagtgtacactctccgtttaagttcatctactttattgtatctataagttatcacacccatcatgactcgttaaagttatacgctttaacgttttatcaaaaaagcttaactcttgttaagcttattaaaattttaataatcctttaaagcttttgttatcaatcgtttcatctaatatcgctagcaaaaatgacggtctatattaaattttgcacaattattattaattattttgaaaatttcatcgcattattactatttagtgactattaatagtcaaaaataataaattgtttttcagttagtactatgcaaatatcacttgcttttaaatacttctctactttcttataatatgattaagctcaattgggggaggaatcatcatgttagccactacgcttaaaaaacgtcgtattgatctacatttaacgcaacaagctgtcgcagatcagcttcacacgagtcgacagactatttcgaactgggaaaacggtaaaaactatcccgacgtcccaatgctggtcgccattagtaatctatatgatttatcactcgacgatatgttgaagcaagacaccaactatctcaataaagtcgctaacgattaccagttaattaatcaacaaaaaaagacacacttattagattatgccttgttgcttactttatcgggattggtcatcatcattctagctacgatttttttcaaatcactggtcaatgaacagttaactgggctcttagtcttagtttttacaacgatcctcgttatcttgagctactttaaaacagttcaattctactctaaacagcctggaaataagcagcccctcttgattcctaaggtcgttggaatcggcctgacaatcaaccctaaccatccaattggtaaaataatctggttatttattttaatttttgtagttggtagcttactgaccgttattttttgattgctatcattttttattaccagggaaataaaaaagaagctcagccatcggattggtattgcccgtggttaagcttctttttatattttcactacaagttttggctttcttcaacttcattatattgatacaagaggagttccatgatggcaattagtgaaacatgcgatgtcatttcaactttatgttgataaagttcgtccgtaaacagataaagattgatgtcactcatattttgaatggtgttattattggcgcccgtaattgatactaactttgcatactgacacttgcgctcaataatctgcaaaatttcaattaattccttatcttcaccctcgtaattaaaaacgaataagatatcatcttgattaatatttcgataagcgagctgacgttgttcataattcttcggaaaaatcacaataaaaccttttaaggtatacaagtattcgatatattccgcagcatatttgctaaacccttttgcgaaaaaatataacttgggccttttgatcattagcgtcacaattgcatttaacttatcattatctaagacacggactgtttcattaatattcttgaggtattccgttctgtaggccacttgattcaccacaaacggattcacttcttccgtttgatcctgattcaaaattgtatatttgatgacggtgatgaactcgctataacctgagaacccaattttacgaacaaaacgcaaaaaagtcgtcgtcgatacaaaacattccgcggctaattcacggatactacgatttttaatatcatccatatttttaatgacgtaatctagtaaaatctgttcatttttgttcaacttatcaacattcgcattaataatttcaaaaaaattcattttaagcctccgtatgtgcgggtactgccgcaacaacacagtgaacatccccgccgcccaataatagttctcttgcatatactggttctatcttgcgatctgggaaaatttgcgtcaacgtttgaatcgccacggtatcttgcggatcatcaaagataggtaagatgattgcatcgtttagcgcatagtaattaacataactagcagttaagcgatcacctggatagcgaggcaagagaccgttaattggatcgacgcctgcactttcttcttgagtcgcaaacagtggctttggcatttgtaatttatgaatcttaaagtgccgacctttagcatctgtcgcggcctctaaaatgcgataggcttcttctgaactggcatattgtggatctgattgatcatccgtccaagtcagtaataattccccaggacgcacaaaactgagcatattatcaacatccccgttagtttcatccataaaataacctagttttaaccaaattaccttttcaatgcctagataagcttttaaaacagcttcaacttcggttttagtgagcatgccattgcgcccttcagaaagaatcgattcctcggtgacaatcaacgttccttcaccatccgtatggaaagcacaaccttctaaaataaacttctccaggcgataataatcgatgccggttagttcgcataatttctgtgcgacctggtcatccatatcccaagggaaataaagaccatccactaagccgccccaagcattaaaccgccaatcaaccgcccgaatttgattcttttgatttaataaataagttgggccgatatccttaatccaagcatcgttataactcatctcaatcactcgaatatctgcgggcaatgcataacgtgcattttgatattgctctttggaaactaacatcgtcactggttcgtagtggttaatgatggttgcaatttccgcaaatattttttgtgccggcttggccccattacgccaattatctgaacgttctggccacatcataatcgattcacgatggcgatttgtttctgctggtaaatagtattggtcctctttaggggtagtccctacgattttcattgtgccactccattctgatctctcatatcgcttgattataacccaaaaagcgactagaaaattgactagtcgcttctttgaaaactactgatggataacggttcctttatcgccggtgataatttgacgaacatcatctaatgcgccaatcacggccggattaccggtttttttaacaaattgaacagctgctttgaccttcggcatcatgctgcctttagcgaattcatcagcatcaatatgcttttgaatttctttggcagtgacatcaaaaatctcttcttgatctggttttccaaagcgatagaacaccccgccaacagaggtcaaaataattaattgatcagcctcaactaattccgcaattttagcggcactaaagtccttatcaatcacagcttcggtgccaattaattggtcaccagatttaacaacgggaataccaccaccgccagagataattgggataataccagcttcaatcacttttttaattgcagggtattccttaatttcaacaggttggggtgaaggtaccacgcgtcgatagccacggccggcatcttccatcatttgccaatcagggtgtttttcttgaagccctttaagcgctgcttcttcataaaaaggaccgattggtttagtggggtggtgaaatgccggatcatcagctgctacgatggtttgcgtcaccatcgccaccacactcttatcaatttttctgagcgctaattcttcctgcattgcattttggaaccaataaccaatactcccctgagtcattgcaccgcaagtgtctaaagccattgcgggattttgatcactatcagctgcttgttgttgcaacaatagattcccaacttgtggaccgttgccgtgtgtaatgattagttggtccccattttcaacaaagttgattaatgctttgacagttgctttgactgcctttttctgtgctgtatcggaggcatcgtttgctaaaatagcattgccgccaagcgctactacgatttttgccatcactagacccctattctaacgaccagcaggaatttgttgagtgatacagtgaatattaccgccacctaataagatttcgcgggctggaacaccaacaatcttgcgatctggatataatttttgaagtgtttcttgtgcttttgcgtccattggatcattaaataatgggaagacgatcccaccatttgcagtgtagtagttaacgtagctagcagctaatcgatctcctgctaaacgtggtaacgtcccgtcaactgtatcaacaccttggctttcagcttccgtgatcagaattggttttggcaagtataatttttcaacttgtaacttgcggcccttagcgtccgtttcattgatcagcatgtcatagttttcttttgaaattgcgtattgtggatctgattgatcgtctgtccaagctaatacgacttgacctggtttgacgaaattagcgatgttatcaacatgaccgtttgtttcatctaggtagataccctttttcaaccagataatcttttcaacattgaggtattctttcaaaatactttcaatttgctctttagaaagttgtggattacgaccatcagataataaacattcttctgttacgagtaatgtgccttcaccatcaacgtggattgaaccaccttccaacacgaaatcgtccaagcgatagcgatcacgaccttcgatttcacaaaccttttgagcaacgcggtcatccttgtcccatgggaaatacaagccatcaacaaggccaccccaagcgttaaatgtccagtcaacaccccgactatcgcctttatcattaaccacaaatgttggcccacaatcacggatccaggaatcgttattcgacatttcaacaacttggatattatcagccaacatgtgacgggcatttgtatattgacgatcactaacgccaacggtcacactttcaaattgggcaattgtttcagcgactttggcaaaagttgcttgcgctggtttagccccttcacgccaattatctggtcgttctggccacaaaagataaacacctttgtgggcttcaaattcaccgggcatgcggtaaccgtcttttttaggcgatgtttgtaatgttttcatagtactaacttcctttctatttctgatcaacttgtttttcagcgtgtctgatacaaatttctccaataatgatagtgacaatcgtcccaattaagattggtaacttgctgcttagctccgcgtgactgccgtttaatgggaacgccgttaagattaatgttaagcccaataaaactagtgggacataagtcatcaatcggataaccactgcattaccgtgaatcttaaaaggccgattacgatctggatcaatctttctgagttttaaaaatgatgggaacatcaacatatatgaccctagtaaagcgaccacatttagtgagaagaatgcccagaaaatattgggattcggaataaacggtgcggcgactactaaaatcgttgcgataatgccgtttaagaacgttgctccgactagcattccatttttagcgctcgttttttggaaaacacggggtaaatcattgttcttagcagcatataatgcaacatagttaacaccggccgaccaagaaatcaagttggctgctagtgtgtacataaagagaatgccgattaaaaccacgaaccaattatgatgtccaaccaataataaaatactatccattaaaccaccagatgtcgatagttgactgcttggaattgcagcgcccatcccgaaagcagcgaataagtagaagaccgcgatcaagacgccgccccaaataatggcttgtggaatttgcttcttgggattttccatatcactagccattgttgcaaccacttcaaaacctaagaagttaaacaaaataactgagatatacccgagacttgtcgcatcaaacttaggcaacatcgctgtcccagagaaatcattagctaatccttgcgtggcagcatggtaaataccaagtgccccaacactaagcataatgaccactttagcaaccgccgctaaattcaaaatccatttactatcagcaattggataacaactaatgagtgtgacaagccagataaagactagttcaataatgatcccaacaggcgtcgctatcttaatctgaaaaatttgtgctagcacttcgttgaataagacagctaaacttgccatccagatggggaaattaatccagtataaccaggctgctcttccgccccatttgcgaccaaaagcacgtttaacccagtcataaatgccgccttcatcatcatatgtcgtccctaattccgcagaaattaggccatacggtaagaagaaaagcagtaataaggcaccccaccagaagaattgcgatggtccgattgcggcagctggtgcagccgattcaacgactaagacaacgactactgacattaatacggcatcaaatagtttaaactttttcttttccatattgtcaccctcatttattgatcaactattgtctactgactatttggttgaatcgattcgattatttaataagtcttttaatactggatcttttaagttgtttaatgtgtcatctgaataatcgataattggtgccatgagataaacaagtaatgcgcgcatagctgtcaaacgattttcagcttcgtcccaagcaactgaagcatctgaatcaagcacactatctgtcacttcttcgccacggttagctggtaaacagtgcatgaatttagcatgtttagcagctttagccatcaattcatcgttaacttggtatttaggatagaaaattgccatccgttcgtcatatgaaagtggtgattcatataaaccgtaccaaacatctgtataaacaaaatcagcatctttcattgcttgatcggtatcttctgtgattaagacactcccacctgaaacttcagcattcttttgaccgattgctaatgtttctggtttgatttgatagccttttggtccgtattgaacgaattgcatgcccatcttagtagcgacaaacattaatgaaacgcagacttgtgtggcatccccgacgaaaacgactttacaatcgcttaacttcttaccagctggtaaatgttctgccattgtgatgatatcgccgatttcttgtgttggatgattgtaatcagtcatcccgttcaaaacaggtactgtggctgcatttgcaattgtttcgattgtgtcatgtgttgcaacccgggccatcaagatatcaactaatcgtgataaaacaattgcggtgtcgcctaatgattcactttcagcactgccaaggtgaatttgaccaggtgctaaatactgggcgtgcccaccaagttgggtcattgctgtttcaaatgatacccgtgttctagttgatgattcttcgaataacatccctaatgtgcgattgcttaataattgtggatagtcaccagctttgatatcctttttaatttgcaatcctaaatcaattaaatattgaatttctgcttgtgtataatcctttgtatcgataaaatctcttttcatattggccatctcctaattaatctcttttgactacgcttacaatataattttttcacgaccaaattgaaataggtttggtgactatcggtttagacgaaatcgatgtgtattttgttccattttgcggaacaaaatacacccttttggtgatacacaaaaagaccccagttgcggtatttaccacactggggtctttgttttttaattagccaaatacttttaagttggttttattcgctttttcagtcttcactaattcgccttggacgcaccaacgacgaaccgtttgatcacaggtaattaaggtgaccattttatgtcccgggacatcatcgattactttgacttcttcaggggcaatcgattttttaacgtttacgcggtatgaatagacattttgtaaatcggttaggtaaaccatatcgccgactttaacattttccaatggtaaaaagatgttggtaaatgaatgacctgctaaggcgtagttattatcggcccccatcttctggtcaggcttcatcgtaccaccgccttgggccattgttgcttctgagacgcccttcatgaccggcaatgcaattccgacgctcggaaccgcaaccttccctaaaacaatcacatcgcccttaacggcggcgctgacgatttgctttgtatcgagtgttttaacactattgaaatcaaaattagcctttttatgttcgtttttcttaatttgagcggccgtcaccgtattcatccggcgattagccattgatttaaccatttgattgcgaattgggccaataaaaacaagtattaaaccaatgagcaataaaagtgctagcagactattaataagccgattcttcgtctttttttgcacaacaatttatcccctttactactgatttattttattgtatcacatctcaaagcggttactcattttaaaaagtcttatttttccacaataattgccggatgcattaaatttcgaaataaattagcggtaatcgcaattgccagtgagataacaactaaccctaggccaatcaacatgacacccggtgtcgcttgtctgactgcaattaaatagaataacggtaagctcaagaggtaggccgcgccattgatactggcgactttttgaatttggcggagggcttgttgtgtcttctgtccaaaatgaccgactagatcgacctcgcgtaaaattcgttggagttggtacaacccccaaagtgccaggatcaatgacccataaaccaagagaacaaccaaccacaagccacccggaatttgggggaagttctgcgcaattttatgcgttaaccgtggcccaatcaacccgataaagattagcggtaagctggctaagccacaaactaatttcaaaaataggatttgaattttcatgtcactcacctcctctttaatttaagcgattcacaccaaataaacaatttaaacgccgcgcctttatccaaaaattaagaaacaaaaaagcggctgatccacaggaccaaccgctaagtcgtattaaccgacgtttagaatatacataaagattacgaatacgaaaaagagcacgtacataattggatggatttccttacgacgaccagccgtaatcatcgtgattgggtaaacgataaaccctaaagcaatcccatctgaaatactgtaagttaaaggcatccccaaaacgattaagaaagctggaatcgcgatttccaatttttcccagtcaattttcttcaatgattgcgccattagcaccccaacaattactaaagcgggcgccgttacttgtgacgtcacaaccgttaaaagtggtgagaagaataaactgaagacgaataaaatcccggtaaccactgctgttaaaccagtccgaccaccaacggcaatcccggctgatgattcaacgaaggccccaacaggtgatgtccccaagagtgaaccagccaacattgctgaagaatctgacatcaaggctttcccaacacgtggcatcttgttgtccttcatgaaaccagcttgttcggctaatccaaccaaggtgccagctgtatcgaagaacgtcactaataagaacgtcaagacaaccacccacatttgaaccgtattaatatccccaacatgattcaaaccagctaagaaggttggttttaaactaggtgcagcagcaacaaaatgggttggtaacttaattaaacccgttacggcccctaaaatagaagttaagaccattccgataaaaatcgcacctggtacttttttaaccattaaaataattgtaataatcaagccaaaaactgttaaccaagtcgtgccttgtgagaagtccccaagacccacgactgttgatttattggcgacgattaaaccaccaccatgtaagccgataaaagccacaaacatcccaatcccggccgaaattgctaatttaagatcgcgcggaatcgcatcaataatgatttcacgtaatttaaaaatagtgattaccatgaaaatcaatgaagcgacaaacacacctgcgagcgccgtttgccatgaaacacccatcccaatgactactgaataactaaaaaacgcgttaatcccaagtgcgggggctgttgcgattggatatttagcgtacaagcccatcaagaaacacccaatggcactggctaaggctgttgccgcgaaaacggcccctttatccatccctgaagcacccaaaacgcttggattaacaaataaaatgtaaaccattgaaataaacgtggtgaatccggctagaatttcccgttggaccgttgaatgttgttcttcgataccgaagaaccgacttacttttcccataataactcctctaaaacaactaattttcccactatctttttagtggtaatgtgtgtataatactgactggtgccaaacccatgagaatgaaagtttgttggcgcgtttaacgacgcgtttcgaaaacgaactttgcattctctttttttgtacccttttttaggctgtgcttaccagattgcttttaaaatgttggtttgatcacgatcgggaccaactgcaaatgtggctaatggtaaatcaaccaattcttgcaagcgttcaacataccgacgcgcgttgactggtaattcttcaagtgtcttaacgccagtaatatcttcatcccaaccaggtaattcttcatagattggtgtacaacgtgctaattcgctcaagcttgctgggtaacgatcgatgcgttcaccgtctaattcgtaagcgacacagattttcaacgtcttcaaaccagttaaaacatcaacacagtttaaacaaagttgcgttaagccagccacccgtttagaatgacgaagcacaactgtatcaaaccaaccaattcgacgtggacgtcctgtaacagtgccgtattcgtgacctgcttgacgaatgaaatcacccgtttcatcgaataattcagttgggaatgggccatcaccaacacgtgatgtataggctttagcaaccccgaccacttcatcaatccgtgaagcgccgacccctgaaccagttgaaacgccaccggcaggatttgaagaagttacaaatgggtaagtcccttggtcgatatccaataaaataccttgggccccttcgaataagacgttgcccttttgatctaaaacatcatttaaaacaacagatgtatcacaaacgtattgttttaattcttgaccatattggtagtattcttcgaaaattgagtcgaaatctagagcttcaacttcataaatctttgtaaataaggcatttttttcagctaagttttgttttaatttagttgcaaataaatctttatctaatagatcagccacacgaataccacttctagctgctttatccatataagctgggccgatcccacgattagtcgttccaatcttttgatcacccttagcggcctcttgtaagctatctagcttaatgtgataaggcaagatgacgtgggcccgatctgataatttcaattgacttgtatctacattcttgtcagctaaaccacgtaattcgccaacgagtgatttaggattaaccacaaccccgttaccgatgacgctgaccttgtcactgttaaaaatcccagatggaattaattgtaaatgataagtatcttcgcctaatttgatggtgtggcctgcattgtctccaccttgataacgagcgattgcgtcagcattctgacctaaaaagtcggtgattttccccttaccttcgtcgccccattgtgttccaactactactgcagatgtcatatgaataaacccctttattcaagttaattgtcttaacctgatatttaagtactaaactcacaaaagctattgtaccaactcagctatttgaaatcaaccgaaaacacgaactttattaataaacactacctgattaacgttttaaatcctaatgatgattacacaacgttaatacagcgctttaaacacgaacaataattacggttttgacatccaccaacttgccctctacaattaaaccatcttaatctttcaaggagttgcctaatgctatatctcgataatatcatcaccgcagcgacgatttttccgtttgtcgcaatcgccctcacaattccggttttaatctatcattaccggcgttctggcgcactaaccttttggcgaagcttagtgatttatagctttatcttctacttattagccgcctactgtctcattatactccccttaccaccaaaatcagtcgtcgctcatttgacgaccccgcgttataacctagtgccgttcacctttgtccgcgaatttattaacacgacacactgggtttggaatcaaccggcaacctatcttgcaaccctaaaacaagcggcgacgattcaaccactctttaatatcgttttaaccattccatttggtgtttaccttcgttacttcttccggacatcattcaaacagaccctattattaagttttggcctcacattattcttcgaattaacccagctgtcaggactctatggcatttacccccgaccatatcggttattcgatgttgatgatctactgctaaacacgagtggcggactcatcggctttggcttagcacccttattaacctatttcttgccgactcgtgatgcacttgatcaagcggcttacatcaacggccaaaaagttggttatctccgtcgcttattagcactgggaatcgattactgtctcttaacactgattggcatgattgttacagcgatttggcgtttattaaaactaccaacttttggtaatgatgttttctactattgtttagaaaacggactctacttcgtcttactgcccgtcctctggcggggacagacacctggtaaatcgctcttgaggttaaaaatcaccgccgaaaatgccgttgcttggcggatattcagtcgccaatttttactgttctttatcatcctacctagtttccaattatggcggatcaccatcgatgccttggttgctagcggccaaacgcatttagatatctaccttctactgggtggtctggctgccttaccacccgtcttatttacgggtaacttcctattatcgtggcttttcaaaaagccccaactcttttatgagaagctaaccaagacccaagaaatgagtttggttcaaccacaagcagatcatcccttaaaaaataattaaaaacaccgcttaattctaaaggtctagcaaattaagatactttccctgttaaattagctataatgaaagtatcttatatctgagaaaggatttacgattatgtttaataaactcaaatacattctcccaatcgtcatgacggctattttaggtctcagcgcccacagcgtttttgccgacagtaatgcttgggataaaccagtcgcaacactcggaacaagtctttcaagtacgcaaaaatcagaaaccctctcaacgcttcaaaacgccgctaacatcaccgattctgatgaattaacggtcaccggttcaaccctcgttaaatatctcgatcaaaatcaacaaacttttaacgcggattccaacgtttattctagtgcgttgattcaaaaaaataatagcaataccgggattaacgttaagattgtcgattttaacggcagcaacaatatcacaacaattaccgcgaaccaatataaaaacgcagcgttaaccgccggcgtcacaaacgcgacgatctacgttacttctgccgtaccaattgacggttctggtgcgctcgccggcgtttacgccgctttcgcggaaaatggtgaaaccttaaatcaatcacaagttaccgccgctcaagacgaaatgagcaccctcagtgatattacccaagctaacaaaggcactgacggctatactgattcacaacttaacaacgccgtaacaggtgctaaaaaagacatggctaacaagggtgataacctaaccgttaaccaaattaccaacatcgttaataatcaattagaacaaaataaccttacaacaatcatcaacaataaccaaaagacacaaatcattaacttactcgttaaaattcaagattctggtgcgcttaaatcagatgattttaagaaccaagccggtaaattaatggataacattcaaagtaatgctaagaatgtcttcgacaaattaaacactgaaagtaaccgtaacttcattcaaaaattattcgatagtattggcaacttctttaaaaacctatttggataatgatttataccacacaaaaacgcctgacgaacttaattcgtcaggcgttttttgattgtttatttagtggttgcttttacggcaactgtatcagcttggactgattggcccatattattgaacttcatgtaagcaactgctggcatgtttgtaataatcaccatcatcgctgtttgcttaccagctgcaacgatttgatcaagatcaacggttgccagtaagtcaccatgcttgattgtttggccttcttcaacagcgacttcaaaaggtgcaccgtttaattcaaccgtatcaattcccatgtggactaagacttccaaaccattagtcgtcttaatgccaatcgcatgtttcgttgggaaaatcgtcatgattgtcccatcaactggtgcgacaatcttgccatcagttggtacgactgcgtagccgtcacctaacatcttttgtgcaaaagttggatcatcaacattttcaatatcaatcaattcaccgtttgcaactgcgtaaaagacatctgtctcacctgagttaatatcactatcaacaggggcttcaactggtgcagcagctggttctggtgcgctggttgcggttggtgtgttgtggttataaagttctttcagggcatccgccacaaattgaacttctgttccgataataatttgaatattggttttgtctaagacgttaatcccagcggcaccagcggccttaatagccggttggttaacgttggctgtgtcttctaattgtagacgcaaacgagtcgtacagttatcgattactttgatattgtctttaccaccgattgcagcgtagatccgttttgcttgaatcatgaatttgtcatcagtagcatctgtttcgacaccggcagtatcttcatcaacagcatcatctgcttcgcgacccggtgtcatcaagttgaatttcttgatggcaaagttgaaaccgaagtagtaaataactgccatgactaagccttcaaccaataacatcaatggttggttggcaactggatttttcaaacttaaaacataatcgactaaaccagcactaaatgcgaagccggctgtccagtggaagaaagcagcaacggctaatgaaatccctgtgaatactgcatgtagaacgtagagtggccatgccacaaacataaatgagaattcaagtggttctgtgacccctgtaaagaatgacgcaaagccagcagctaacatcaatgaagctgttgctttacgacgttctgggcgagcgttcttgtaaattgcgtaggcaccagcaggtaacccaaacatcatgactgggaagaaaccagcttggtacatccctgttttaccaatcacggctgttccggcagcaagtgatttcgcaccgcccaagaagttaccgatatcgttaatgttagcaacatcaaaccagaacactgagttcaaggcgtgatgtaaaccagttggaatcaataaacggttgaagaaaccgtataaaccggcaccaacccagcctagttttgaaattgcttcaccaaatgatactaaaacagtaaagacagctggccaaacaaagtacaagattgctgaaacaaccatcattgctgttgcggccataattggcaccaaacgtttcccactaaagaaggaaagcgccattggcaacttcacgttgtggaaacgattgtacattgcagctgcaattaaaccggcgataatcccgattaaaacattaccttcgattttaccaaaggctggattcacctcagcgatatctgataaaccttgcatcgcttgaattgaggcaggtgctaaaatggtcttagggactaagaaagcgactaaaccagcaagtgcggctgccccatcctgatccttagacatccctagggctagaccaacggcaaataataatggcaagttgtttaaaattgcgccgccaccagctgctaggaaaattgtaaagacgtttgcatttgaatcgccattgccaacccagttagcaatcccgatcaaaattgcggctgctggtaatacagcaacaggcaacattaatgaacgacccattcgttgtaagtaattcttcataaggtgttctccattcattcatttatttcgttaacaatattaaatcattaatgcaaacgataagcaagcgcttaatagtcggtatagacctttaaggtcaaggaataaagcggtttcttaattcgaaaatattttggtctataccgtataacggcattaattattgcctttaaattaaaacggttgcaaaaataatgatttgacgtatactgaaggtacaatttaatcgctttgcactaggggtgttcttagaagaactgagataggtttgtacaacctgatccctttgaacctgtaagttcagacttgcgtaggaaagtgcctttctctattaaaccaacaccacttttctatgcattcgtgcatccaaaagtggtttttttgattttaagggaggttttttgcatgtcaaagacactgttagaccagataaaacaggctaacccgattatcaccaacgttgccaacagcgtcacagtcgatcaagtcgccaatgttcaaaatataatcggtgcatctccaatcatgtctagtgatcctgaagaggccccagaaatggtcgctattgcgcaggcactcagcatcaatattgggacactatccgctgaacccattcaccaaatgaagactttaatggctgaagcttatcgccaagctaaaccagtcgtcattgatccggtcgcagtcggttcaattcattatcgtcagaaaattatcgatgaactcttagcattgggaacacccaaaattatccgcggaaatgcgggggaaattgcttacctagctggtttagactggcaagctaatggtatcgatgcgggtagtggcgaaattgatctcgtaaaagttgctcaaacagctgctaaaaaacagcaaacaaccattttactttcaggtccaaccgatatcatcactgatggtcatcacacgactaaagttgccaatggcacgccacttttccaagtccacgtcggctctggcgatatgctaactggtctttgcgccgcatttgtcgccgttagtcctgacaatccctatcaagcggccatcgacgcggcaacgacctttgcagtcgccggtcaattagtcgccgaagcaatgccaacgcctttacctggttctttttacccacaactattagactgcttgtttaacatcacagcagctgacgttcaaacccatgcacaagtcacggaggtcttaactcatgaataatttcccacaagcattaacaatcgctggttcagatagtggtggcggcgccggtatgcaagccgacattaaaaccatccaagaacgccacgtctttgccaccaatgtggtcgtcgcaattacggcccaaaatacaattggcgttcaagatagcttcccgctaccgctcgaactagtcaccaaacagtttgaatcgctcgcagccgattttaagatccgagcctgtaaaacaggcatgctcgccgatgctgagcacgtcgccgtcgttgcccaaaacctccggcacttcgactttggccccttaacactcgatccggttatgattgcaaaaggtggtgcctctctactagccgactccgccattgacaccttaagatcagaactcttacctttggcaaccgtcttaacacctaacctaccagaagcagaggtgttaaccggtcaaaaaattcaaacaactgccgattttaaaatcgccgcaacgcaactgcaaaaaatgggtgctaaaaatatcatcattaaaggtggccatctcgataatagtgaccaagcctgtgattacgttctctacgctgatggtagtgacgactggttaaacacaccacggattgcgaccgttcgcacccacggcactggtgacaccttctccgcttgtctaaccgccgagctagctaaacaagtcccactcaaaaaagccattcagattagtaaagccttcattcaagcggccattgccaatccaattgcagtcggccacggtcacggccccacaaatcattgggcttatcaggaggttgaacatgactaatattgcccaggaaatactccaaacttatttagtggctggtacacaagatactggtcgagaaaactttttacctatacttgaccaggctttacaagctgggattacttgctttcaattcagagataagggcccaaatagcttaccaactgacgcaatgcggtccgactacgccaaaaaggcgcaagcactttgtcgtacttatcacgtgccttttattatcgatgatcgcttagaattagctttagatttgcaagcagacggactccatgttgggcaatctgatcaaccatggcctaaaattgaagttgccaagcaacacggcctaattaccgggctatcctgtcatactgctcaagaaatcctaagcagtcatcaacaaccggcgctcgattatattggtgtaggccccatctttccaacaaactctaaggaagatgccaaaacaccactcggtttagcacaactaaaagcattcacgcaactcagccagttaccggttgttgcaattggcggtatcagtttaaaaaactgccaacaagttgctgagaccggtgttgcgggggcggccgtgatttctgctattacacaggctaaaaatattccccaagcaatccaactattaaaccaaccttggcagagctcagaagggaataatcatgaaagttaatcataatcaattcctactctggtttggggcggctatttcaattgcggaaatcatcactgggacactcattgcgccccttggtctcgtcaaaggcagtctagccattatcattggtcacctgattggtgcctttttattgctgttaccggctagttttctcggtggcacgcgtcatcaaaacgcgattgagttaacagccccaatttacggtaaaatcggttttatcctctttgcgattttaaacgtcattcaattaattgggtggactggcatcatgattgctaatgccgcccaagccatgcagcaactcaagctgactcacctcagttatctgatgaatgccattatcgtggctggcttaattatcttctggttggcaattaaaacgcaattctttttcaagctaaataactccatcgtattgctcttagtggttgcttgcctgggccttttttggcaactcagtcaatttgctggtcacgccactcatctgagtgccaatccactgagctttggggctgccatcgagctcagtattgcgatggccctttcttggttaccattaattgcggattataccaaggattcaaaaaagccactagcactctctttatggagtactagcggctactttcttggtagtctaatgatgtttttcttaggctttttaaccgttattacgactggctatactgattttaatcagtttctagcaactagtcgcttcggctttttaattttatttatcatcatcttctcgaccattacgacgacctttttggatgcctattctgctggcgttaatctcaaaaacctgttccctaaaatccgttattcagaaaatggcttagggatcgtcgtcacattgattgggttgggcttaatcgctaatcaacaactcttcaaatatgaactctttctcacactcattagcgcagccttcacaccactctacacgattgtcttcttcaattacttctaccgtcgattgccaatcgccgtcaactttagtggttggcttttaggggcaattgcttattatggcttgcagcgctttgattttcccctaggaacaaccgttcttttgatgatctgcctctggttaattttatgctgtatcgctcaagttgtaggtcatcggaaaattaatcgttagcgatttctgcaaaatactgttctttttcgcgggcccagtaatcctcttcagcttgatcaattggtcgtaatacgcgacagggattcccgactgcgataacgttatccggaatatcttttgtgaccactgatccggaaccaatcacgacgttgttgccaattgtcacacccggattaacggccgtattgccgcccagccagacatcattgccaattgtgattggtttgccatattctaagtcatcacgacggccttgtgctgagattgggtgaccagcggtgtatagaccaactcgggggccaaagaaaacattatctccgattgtgactggcgcgacatcaataataatacaatcataattcatataaacgcgttgaccaattgtcgtctgacacccataatctgttcgaaacggtggttcaatgtataaatcggcgccactttgagcgaataattggtgcgtcaattcgcggcggtaagcctgttgttcttccgtagtttggttaaaaagacgcgttaaaacacgggcccgtttcatatctgcccgtagttccgcatcatttgcacggtaaatctgaccgttaaccattcgttctttttctgtcattcaaaatcccccatttccaatgaaagaggtgcgccacaaaataaatttgtgatgcacctctttttgatttccaaactttgacactcgacattaatgcgcaaagccaaaccgtttcaaacgcacttttttaatcgtgttttttgaaactgtcttctgcgcctagcgtcactcgttaaacaactgcttccagcagttattcaccgagctgtgctaatgctcaaagccaaaccgtttcaaacgcacttttttaatttaccaaattgtgacgcgtttatccggtgctaaatacatcttatctgcagattgaacgtcaaaagtagtgtagaaatccgctagattttgaacttggacgttcgcccgtaaggcatttggtgcgtggacatcgatatttaatagtaattgttgatattgttgtgtggctttcatccgccaaattgttgcccagttaacgaagaaggcttccaaatcaacatcatcttcacctttagccgcttctagcgcacagcttaagccaccagcatcagcgatattttccgaaacggttagcttgccatttaccttttgatcagcaaatgctaagccatcaaattcggtaatcattgcttgtgatagagccttaaaatggtctaagtcagttgcttgccaccaattatgcaagttcccgaattcatcgaactgcgcaccgttgttatcaaaagcatgtgaaatttcgtgggcaataaccgctccaatcccaccataattagcactactgctttgttgcaaactataaaatggggcttgtaaaatagctgccgggaacacaatcacatttttagaaggtgaatagtaggcgttgactgtcgccgcgcccatttcccattttgcacgatcgactggttgggttaatttagcaaagttttccgtttcaatcgtccgaatgaaatcagccgtattttcaaataacgtcccatcatcagcttggggtacagtcaccaatttttcaaagatgggtgcaattttttcgggataaccaacatgaatccctaaatgattgagtttcacaatcgctttttcgcgggtttctgtagtcaaccaatcgttttgttcgagacgattttgatagacaccaatcatctttttcaccatggcttcgacatccgccttggcagttgccccgaagtaacggcggccatagtaatccccaacgacttgattaaacatgccgagggctaagtaataggcactcttttgttgcggttttgcttccttgctaccggataatgcgcgactataaattgaactaatctggcgcatttcttcattcaagtagccactccaatcacgaatagtcatcacaagtaaccaagccttaaattggtcaaaatgatcgtcattaaccaactcgttgagctgttcaaaataagctggttcagtcacgataattttatcaggttggactggcaaaatgcggctgaaaagttgtttgaaatcaattgattgttgttgtgcaataaagtcgcttagtggtttaggattatacagctttgcataatctgcggcttcttcggcgctcttcacaaatggtgcgagtgagcggtcaaaagccaacgcttctttaaccgttttagtcgcaacaactggcgcaaagccgaccttttgtagtagttggaccatcatgtcggtaaagactgctaataattgttcggcgcttttgttcccttcatcgtagtacgttttatcaggtaaaattaagctccccgcttcagcgtagagcgcgtggtgtgccgtatctttcatatcggcatctactgacaagccaaaaggtgttggtaggcctgataatacccagtctgccaagccttgattgtattctgttaaattgttaattgagcggacccgtgcaatgaacggtaaaatcggattaatcccgagttcatcacgtgttttaaagtcggccgctagggcataataatctaaaaagtgttgtaataacgcattatccgtttgtttaagttgcttaaaatcggtcattaattgttgatcgatttcatctaccagggccacaaagccaccggttgctggtttatcagctggaatttcggctgtttttaaccattcttgattcactgccgtgtaaaaatcatcttgcattcgaacgtttgtcattgtcatcctcctcaatcagattctaattcaattctaccattgatgccctactttccggtagtctaagcgctttaattattgataacgattgcaatcaaaaacggtcggcattttcttttagaatgatgccaaccgtttttttatttttgcttttccgctttcagcattgcaaatgaccgcataaatgagcgcatcacgcccttgtctgaatagaccaaaatgttcatgcgatagataatcagtgctaaataggtaaggcctatcaacgtgataatcgctaagccaagtccaagcgtggctgctgttgcagttaagtcaccactagcaaaacgcaccggtaacatgatttgtgaaaagagcggtacgtaactcaggatttttaaaaagccgatatccgaacgcgtcgttaagataaacccgcacatataactgattgtactgaggattaataacggtgaaatggcttgttgcacctgatccattcgcgaaacgacagaccctagcattgctgcaatcactgtgtagagtaaaacgccgacaattaggaaactaatcgcataccaaaccggtggtgtccagaggttcggtccgacttgctttaaaatcgccgataatggtaattgttgttttaagtagtgataacccaccacaccaattaggatgtaaaagacaatctgggttaaaactaatgctaatacagcggcaattttagcaaagaattgagttgtcgccgagacacttgagagaatgatttccataatacgcgagcctttttcagtcgcaatttcctttgcgataatccccgcgtaattaacgataaagacaaacattaagactgtaatcgctaatgaaatgccttctcccacttgtttttgattagattgatcaattttttgttgcccagcttcaaactgaacggtcacggatttaaccgtcatcggtgtcattaacttttgaatttggtccgccgggacgttagcttgccgcgcaagggtcacaatattcatttcattcaactggttttgaatgccactcggatcaaaatcacgactatctttccgttcaaaatattggctattgccttgctgaatgattaaataaccatcaattttttcttgtttcaacgcttgagctgcttgcggttgcgtcttaatttgcgtatcaatgacgtaatcttgccctctcatttgttgcaaggctgcttgttcagctggttgttgactgagaaccgcaatcttagctggttcggtggattggtccatcaatttgccgatccctaggacgacccctaatagaataattggcatgataatcataatgatataggccggacttttaatatttttaaagaaaacctgtttaaaaataatcttaaatttagtcatgttgctcacccactttcaatctaaatatttcgtctagactaggcgcttgttgactaaattctggaatataatctgcttgcgtcgcgcgttcgaaaatctctttgccaaccgcttcgtcagctagcgtcaattcaaactggtgaccgtggcgtgttacacgtgaaacaccttcaatttgttccagttcagattgcgttgacggtgattccaagaagagtttcatgcggccaaactgggctcgtacttcatcgacacttccggataacacgacttgcccattgcgcaacatgacaatccggtcactaatcttggcaacattcgtcatatcatgactcgaaaaaataattgccgagccttgcgacttcaaccataaaataccatcttctaataaaccagcatttacaggatccaacccactgaatggttcatctaaaataatgagcgctggtttatgaattaaggtcgcaatcagttgcaccttttgttgattgcccttggataaatccttaaccttatcagtacgttggcccttaacagcaaaacgcgctaaccactcgtcaatttgtggtttaatttccgccgcggtccgcccgcgtaactgcgcaaaatataaaatttgttgttcaacggtcatcttaggatagaggccccgttcttctggcaggtaacctaattgatcgtagtcacgactggtaaatgcatgcctttgccacaaaatcgtcccgctatccggtgttaaaaaattcaatatcattctaaaagttgtcgtcttaccagcaccgttttgcccaataagccctaatatttcgcctggttgaacggtaaacgatacatcatctacagctttcatcgccccaaaacttttttcaagatgcgttaacgttaacatattaatgcctcctcaacatttattaactactttaaccatacaatatcccttacgaaaacgcattattattattgccataaaaaaagagtcaccaactaaactcggtgactccgaaatactcattattgaatttcaatttggcttgttgattgtgtatcttcagccatttttggtaagactaattgcaaaacgccatcctcatatttcgcgctaattccttggcgatcaacttctggtaaataatattgacgactgaagcggccatagtgacgttcactttgaatcaagtttccttctgagtcgctgtgatcgttaaaactatcccgttttgcactaatctttaacgtattgttttgataatcgacgtggatgtcttgcttgttgagcccaggtaaatcaaccgttaattgataatccttatcggtctccttcacgtctgttttcaacaagttgtcagtttcaggcgacattgcaaagaattgtttgccgaaattcttgaaaaagtcatcacctactaaactgtctaaccaatcttgacgacgatccattaattcgtttgccatctctaaaacttcctttctttatcttaattacaattctattttaacgcgttagtcgtctaatgcaagtaattagcactctttcattgcgagtgctaacgcaaaatagttaaccgccctaatttagcattttaattcccgccttaagcgttttatgctatacttaaggttccaaaaatactcggaggtagattcatatgaaaattgttgtcttagcgggcggtcgtagtactgaacgtaacgtttcactaacgtccggacacaagattacccatgcactacaaacaaaaggacatgatgttgcctttgtcgatctttttttagggaatgaattgaaagatggtgccacaatcgactctctttattcatctgatcccgttgaaaaagattatgatattgatgatgaagttttaacagatgacgacatcaataaacttcgcgaagatggttcaacacaactatttggtccgaatgtcttagaaatttgtaaaactgctgatatcgtattcctcgcactccatggtggcgatggcgaaaacggtaaagttcaagcggttctcgatgtctttgaaattccttatactggtagtgacacattagctgctggtattacaatgagcaaaaaagtttctaaagaaatcttactcttcaacaacattccaacagcacgttttgtcgctgcttatcgtcatcaaccaatgccagaaatgccatttgaataccctgttgtggttaaaccaagtaatggtggttcaagtgttgggacacatatcgtccacaacgaagctgaattaaaaccagctgtcgaagatgctttgcgttttgataacgaagccttgatcgaagaattcatcaagggtcgcgaattctcactgggtgtcattaacgaacaaccattaccagccattgaaattgaagtcaatgacggttggtatgactttgaacacaaattcgtaacaggtaacacgacgaaattcgtcacaccacctaacaacttaccagataatgttcacgaagccatgaaacaaatggcgcttgatgccatgcacgcgcttggtttaaccaactacgcccgcatcgatttcttctggagtcctgaaactggcttatacgtcatcgaaggcaatacattacctggtatgacaccattatcattaattcctcaagaagcagaagttcttggtattagctaccctgatttatgcgaaatgattgtgaatggtaaattagctttacttaatgaaaaataataagtttctaaaaaaaacgataagcctgagggcttatcgtttttttattattaaatactagtggtacccccgcttaatcctaatctaattattcctctttaggaactaagattcaaagaagattagaatcggcacatctagctgatcgtgtagcaactgaatttccttgacggtaaacggaattttaccgcgaatcttacggttagcagttgttagcgttttatttaaaacatcagcaacttcctgctgcttgatgtcacgaccctttaaatatcctgatagcacgaaaagttttcctgccaaatttggcacccccaaatgaatattctcaaactttgctccacattaggaatattacgtcatctagataaacttgtcaattaacgattttgtacgaaagtgttaactttttagcgtattttgtcatatacttagtactatagtttttattgcgagtaagaaggtgaatttaatgtttggacaactattacatgataagcgggtttcacggaatcttacgatgcggcagctagccgatttattaacgcaaaaatacaatattaaggtcagtagctccatgattttccgctgggaaaaaggcgctgccccttcattaaaagcgttgttcatcatcgcgactgaattacaagttgatctcaatcaactcgctgtcatcattgccgacagtaacttaacccgtcccgaatctctttcataaatcagtagtacactaaactaatcaaaaaggactcggctaaatgccgggtcctttttttatttcgttttaattgttttaacccctaagacgtccaagaagaacgtgaaaattggtaacccaacaatcaagccccacgtgcctaagaaacgttcagcgacaaagagaacgacaaaggtgaagaaaattggtagttgtgtcttgctcgacataaagcgcggattcaagacataagcttctagcgcgtgaatgacggtaatcatcaacagaatataaatcacatactgcacaccacccactgaaaaagcgatgatacatagtggaatacatgacagaatcacacccgccactgggaccattgataataagaaaatcataattgccaaactcggaatattaggcatcttcatcaccgtcaatgtgatcgttgtgaggaccgtattaacgaccgcgataaagatttgcgcttcaatcacaacaccaaaagtgttcacgaattttttagcaaagtaagcaatatcttggaaaagccaaccgtaggtactctttaagaagagcccaccaaattgtggtaacttatccagttcaatcgtataaaagaaactgaggataaacgacaagacaatcgtcacgcccatcgtaccaatcccggtaatatagttaaccaaggttgaaacaccatgctttaactggtcggtcaaattaaactgtttcatgtattggctgatcagttgcatgaatttattggcatcaaaggatggactctggtaaaaattataaacactttcacctaatttaatcgtttgtttagcgatttgtggcacataaatggttaccccgagatagaccaataaaatcactaaaatgtagagtggtacaaccaccgcggctggtggtatccgaacataacgctgcacgtggcgcaccaattgggtaactaaaaaagtaaagatgaacgtcaacaagatgatattcatcattgaacgaaccgcaaaaataacaccaatcatccccattagaactactaggcgccgtaattgttcgttcgctacaaatcgttggtataaagtcacacgttttcctccctaatctaaaacatatcatcattttacaacacttcgcgttaattgaataatgaaaaatctaaccttacataagtgttatgacttacataatttttaaaataaacgtatactagtttggtattaaaaattttttcctagaaaggattttcggaatgttagaaaaaactttttataagaaactactacaacactcttttgattttccagtcgccgtccacttttgggatggtagtactgacgtctacggaaccggagagcctgaaatagcaattacttttaaaaaactcatccccatcaaatcactaaccagcaacgcctcattagccttaggggaagcctatatggcaggcgatattgaggtgacaggcaaaggtgacgcaccacttcaaaaactactgacagccgcttataacagctcagagagttttatgcgcagtcacagttacattcactttttacctaaacaatcacactcagaaaaagctagcaaaaaggatatccaaagtcactacgacttaggaaatgatttctaccaactttggctagataaaaccatgacttattcttgtgcttatttcgaacaaccaacagatgatttagaaactgctcaaatcaacaaagtgcaccatattctacaaaaactcaatccacaacctaatcggacattgctcgatatcggctgtggctggggcacattgatgttaaccgccgctaaggaatatcacttaaaagttgtcggcattactttaagccaagaacaatataattttgttcaacaacgaattgacgaagaaggcctcagtgacgttgcgtccgttgaacttgtcgattatcgtgaattaaaacacgccccatttgattacattacaagtgtcggcatgttcgaacatgttggtcaagaaaacttggctgaatacttcaaagatgttgcggattacttaacagacgatggcgtggcccttattcacggcattacgcgtcaacaaggcggcgccaagaacgcctggatcaacaagtatatcttcccaggtggctatgtgccaggcttggttgaaaatacgcaacacattgtcgatgccggtttacaaatcgctgacatggaacctttacgtcggcactatcaaaagacgttggaaatttgggatgccaatttcaacgcacaccgtgatgaaatccaacaacaaacgagtcttgaattcgttagaatgtgggatctctatctccaagcttgtgcctcatcttttgaatctggtaatatcgatgttattcaatacctcgtttctaaaggcgctagcgcccgtgatttaccaatgacacgtgcttatatgtataacgtctaaaataaaagtgtgtgctaccacacacttcatccaatcaaaaagtcgctatgaacaattgcttgttcacggcgacttttttgtcttcagttatttttttaaaagtgcttcagctttagtccgtacttctgaatcgctcatgctgaggtaaggtttcattgcggcaactgtttgatccgtattgtgaccatttgattccatgtagtggtcccataatgcttctctcacgattgttgcatcgtcgctccagtcaaatgcctctgacatcttcatatctaaaaccaatgttgctgtacctactgccattgcaaaagcctcctaaatatttcttactacactttctatattagtccctttttcaaaaagtgtaacaaaatacgcacttttatttttaaaagaggttcgcaaggcccatcataacgacctgactgctcatcacaagcaatagcaagtgaacaataatttcaaataggatgaccgtgtaaaattgatcgaagcccgccattggttgacggattagactgacgacaatcgccatgttcaaccagaggtagcccaatactagtagaatgacaactaaccacagcgccatcaagcccgccataaaagtaaccaacaatgcggccaacgtcaacaataagacaaagctcccgtaagcgctgatttcagttagatagcgatcaaagcgcaagcttttttgttttagaaggtaccgcttcaatacataaccggttccgactaaaaccaataacccacccagttggattaaaaagaggcgtaattcaagcgtccacaaagccactggctggcgtaagataacttgcgtgccagtgacaccggccacggccccgacttgttcggaccagcccgccatcaataaactaatcgtcgccgtattaaccagcaataagatggcaaaagttacccagccaaattggggattaacccaccgccatggtgtttgtaggggttgccgccaactcgcctgtaaaaattggtgatacttgagtgcggttggtttggcttgagtcgtttcgtgattgattgcagccgcaccgcaatttggacactgctgcagcttgcgaccatatttaatatgacattgtggacattctagcatagtcttgcctcctgataatcctattctaatcgaaaaagcacccaaaacaaaataaaaattgtttgggtgcttttagattcttaacggacaaccattactgagctaggggcatatttagataagtagctcgcatgtgtaccgattaagtgttttgaaggttttgtttttgaaccacagatgacaagatctggtttgaattcaggaatgatttcttcaacgatcacgtggcttggattgccttcaccaagaatcggtgtcacttcttgcacaccaaattcttgggccttttgaacgaagatatctaggtctgcggcaatttcttcccgtcgtttagcgaccacgtttggtgagagtgattgatagatatttaaatcgccggtttctaagatgctgacaatccccattggaatttgatacatcttagcgacggtacaagcgtaattaaaagcgcgttttgatgacgttggatcatcatcatcaatcgcgattaatagtttttggtagtgcattgaagtgacttcaatgtttaaaggttgtttttctgtcattttaaggactcctttatttttcgatgacgagtgcttctttagtatgcacaagttgggtaatcaattggttgacgggcgttggaatgccacgttcttggcccttgcgcgcaacgtagccgtttaagtaatcaatttccgttaaacgatggtgttggattaaatcttggtgcatcgatggataatgttcgccagcttgggtgggatcaaataattgatcgatatgcgcaatcgttgttggcacatccaaatcaaccgcttcggtcgctgccactgctgaaaattcagccacaatcgaagccagtaatgagttgacctgactcgtccgaccgagttgggcaatgttacaatccaataaagcacagaggctattcaaggtgccattcacacaagctttgcgccaaattgaaaacaagacatcagcactataggtcgcatgtaaaccagcggcactcaacatcgcgactaattcttcagcggcacctttggcttctggggccacattttgaagttcaacactgccggaaccactaaggctaatttccccaggaccggttaaaccagcagtccacaacgtaatgccgacgaagatattatgtttgggtaagtagcgttcaattgtttcgggatgacccaagccatttaataaacaaacgaccttcgtcttctcaccaatcagcggtttaatcgattgtagcatcgcccctaattgcatcgatttcgtgaagatgataatcacatcttgaacgtctttaatcgctgtgggtaaggctgctggaatttgaacgtgttgcacgtcttgtcccgcaatcgctaccgttaaccccttggtattaattgcctgaacatgttcgacccaattgtctagtaagacgacatcgttcccggctgcttgtagcatgtagccaaaacggctgcccattgcaccagaaccggcaattgcaatttttgtcatttattcaacagctcctcaactcttatttactgtttaatcatgccatattttctgctttttttcactagaaaccgcttaatttatgataaataaaaaaagagtgtgctatcagtcggggatatcctgaggattaacaaagaatggtgaatgattgcaccagcaatcgtttgccattcgacgttaaccacaaggatatgactgatagcacacgtttagcaactatcgggtattaaaaaagttgggccaaaagtgatttttggcccaactccgtttgtatgctattgatttgcttgccagttcgcaatattttgagcagcaagtgccaaactcaagacagcatccttagaaaggtccgcttgaatgaggttatgtttaacagtagccgcaacagcgccaatcacggctaagccgtaagtgaggacttctaagtcgcgtttcactaagtattgatcttcataaacagcttcgtgactgtattcaaagttaactttgttatcggctaaaataccatcaacgtgggttaccatgatccggtcagtaacatccatcaataatttacggtcatctgataaggttaatttatggtctgattcagattgatagtaagtttcttctgtaatatccaagtattttgctactggattattcaaaacaccaaaaccatctaatactgcaaaaatttctgaaacattgaggctaactttacgatcaataattgccgtcatgttttcttctaaccaatccgctaattggcgaacgttatcttgtgccatttttgtgtgctcctttaaattatctaaaatagacttttaatcttccctatcatcatacaccatccgcgatttaagggacagtctatcccttcagatgctggggatgatcgtcgattaaacccgcaccttgcaagtaagaataaaccgtcactggaccaacgaattggaagccccgccgcttcatatcccggctcactgcaaccgataatgctgattgtgcagggacgtctgcccacgtttttggtcgattaacgattggttgcccgtcaacaaaagcccacagatagtgcgcaaaactttcctgttcttgttgaattgctaaaacgatttgcgcattattcaccgttgctgctagcttacgccggttgcgaatgatcgctggattttgtaataaacggtcaatatcagtcgtcgtcatttgcgcgactttttgaatctcaaactggtaaaaagcagttctaaaagccgcccgttttgccagcaccgtttgccaactcaaacccgcttggtaggtttccaaacacaatagttcaaataagcgctgatcatcgtgttccggttggccccattcttgttcgtagtaagttaacagctctgctgttgcattcatccaattatcgcttgccatgttcatcgactcccttctacattaaagtacgttaaaaagccacgacaacttgtgctgtcatggcttttttgattacttaaaattattttttgtagggattgttattgacatcagtcttcacaatcaacacgtcacaaatcgctgtccggttaacgtattctgtgacagaacccattaacatccgttcaacagcgtttaacccggttgagcccatcataattaaatctgttttgtattctgatgggaaatcacgtgcgatgacattcttcggattgccaaaacggacgtgaatttcaacgtccatcaaattatcattggtttgaatatcatatttcaaactattgagataattttgtgcgtcttctgagatttggaaaatagcatctccagaaagcatgccgctataactccctgcatattgtttcgtatctaatacatttaaaatatctacttgagcgtgattcatcttagccacttgaactgccttattaagggctaattcagcttcttcggaaccatcaactggtactaatattctcttatattcttgaaccatgctgttcatctcactttctctttatgcacaatgtcacaatgatactacattaagaatataccgctttcgcggacaattcaagcaaaaagaatagcgttttcttaagtgtgccctttaaaaataatccttcttcttcagccaccagccaaccaaggcactcacaattcccgataagcccaatagcaggataaaccccttaccactatgcgttagcggcactggcacattcatcccccagaaaccaccaataatggtggggaccgttaaaacaatcgaaatcgacgtcaacgtcttcatgatgttattcaaacgattggaaatgatatctgataataaatcacttaattgttctaacaaagcgcgataagtcgtaatcgccttatctgatttagcaaactgtaaatcgatgcggtaaagacgatctttttgatcagccacttcttcaaataacgccgtctctttaatctgcggtaagctctgctgattactttttaaacccaaatccaagtaaacgacactctttttaagtgctttgagtgcgtataaaatttgattccgcgtcgaaatatggacgtttttctccaactgatgaatctgttgggcgaccacatctaaagcggtcaaatagcgttggtaaatcaacgagatactctgtaacacaatgctttcgacctgttgatcagttcccgtaatccgttgcatctcggccaccaattcactttgttggtgcccaactgtcagtaaggtttgcccactgatgataaatgaaaacggccgcgtaatgtattcagcatgtttttcagaatcatgggttttgaccggtactaacaagcaaatatgactgagagtttcacccgtttccgtcgtaaacgtttcataccgagccacttcattgatatcttgggcgacctcaaacaacatgcgtggcaaatggtacttccgcgcaaaatgctgcatctcatgcttgctaggatcttcaaagtgaatccaattggccgctttttccgagcggctctcacgaatctcaccggtcgtctgtatttcgaaataggtaatcatttatccgtctccgcccttttcttcttatcatacgagctttcctacacgcttgacaagtgacagtcatgtcaataataaatatgctacaataaatctatgagaaaatagggaggttttagagatgacacaacggattttaccactcgaaaaaggccataactttagagaattaggtggctatcaaacgactgatggccgcacgcttaaatggcataaattactgcgctcagccaacttagcccatctcactgatgcggatttaaactatcttgatcaatacggtttgcgctatgatattgacttgcgttctgaagatgaaaaagccaaagcgcccgatcgattacccgccaatacgacttacgaattcctccctgtttttgctgttgacgaaactgccaattcagcgagtcaggatgaactctatcaactctttagcaaggaccccctcagcggccacactcggatgcaaaaggtttatgacaatttgattaatcagccccattctaagcaagcttaccgccgcttttttgaattactgctcgccaacgatcaagatcatcaaacaacccttttccactgtacggctggcaaagatcggaccggcatggccactgtcttcttactcagtgcccttaatgtgcccgcagagacgattcaagctgattacctgctcactaacctcgcatcggctgattttgtgcagaagtccttacagcgcctccaacaaaagacggccgatcaaggcatttaccaaagcgttcaatccttattgaccgttcacttggattatctccaaaccgcccaaatggcgattcgccaagaatccggcacaattcaaaattacctcaagactgaattacaactaaccaatcatgatttaactgacttacaaaaaatttacttaatgtaaccgaaacaaataaggagtcccattatgccaactttaaaagaacaagtcatcgcagccagtcgagaaattggcatcgataaaattggctttacctcagcggcgccttttgactatttagaggccagcttaatcgaacaaaagaaaaatggccattccagcgggtttgaacacaaagtactggaagaacgcctctatcctgaattgattttcgaccaacccaaatcaattatcgccatcgcgcttgcttatccaaccaagattcacaataaacccgccagaacaggtgccaaacgcggtagttttgcacgggcttcttggggcattgattaccacgatatcttacgggacaagatggcccaattaatcgacgcgatcaaagaacttgccgatgaggatgatgaagtcactttcaaaccaatggtcgatacgggcgaattgagtgacgtcgccgttgcacaacgcgccggccttggttttatcggcctcaacggattattgattacccctgaattcgggtctttcgtctatctcggcgaaatcattaccaatattccgtttgaacctgatacccctatggccaaccaatgtggcagctgtacccgctgtatcgattattgtccgcctagcgccctattaggtgacggtcggttaaatgcgacacggtgcctttcttatcaaacgcaaacaaaaggctttatgccagaagaatttcgccctaaaatccggagcgtgatttatggctgcgatatttgccaacaagtttgtccttttaataaaggcaaggacttccatttccatcctgacatggaacccgacccagaagcagtaatgccagagttacaaccattgctaacaatcagcaataaagaattcaaagttaaattcggtcacttatctggttcgtggcgaggaaagaaaccaatccagcgcaacgccattatcgcgcttgccaacgtcaaagatcgaactgcgattccccagttattgcaattaatcgataacgatccccgacccgttattcgcgggactgcggcgtgggcactaggccaattggtcagagatgtcacgccggagatgttagacttcttgcaacaagccgctgataaagaagaagaacctgaagcccaagtcgagtttcacaaagcattattaattctcaatgaacgttttgaagagaggtaggcaccatagcacatgcaaaataagcaacaacagacgcaactcacccaaccattgattcttttgatggcttttatcacgggtgttgcggtttctaatttatattatattcaaccgattcaatccctggtagcccaaactttccacgttaataccggcgccattggcacggtcgcgatgttaacacaagtcggctatgccctcggtttattactaatcgtgccttttggcgatgtcatgagtcgttatcatttaatcattcggatgctgattttatcgctactatccttgttagttgcctttttagcgccgaacttcatcttattcgcactttccggcttactgattggcttaacctcagtcgttccacaaattatcattccctatgcggctgttctagcggcaccccaaaaacgtggtgccgtccttgggacgattttaagcggcctcttaatgggcgttttactctcccggagtttcagtggcattatcagtagctacgtcaattggcgttgggtttaccttttagccgtcattgcgattggctgtctgattatcttagcggccatcaaattacctaaggatacacgccctaaaaatggccctagctattggcaaaccatcagttctctacctggtttagtacgcgcccagccacttttacgtgaggcggccattaacggcttcttcatgtttgggaccctcagcatcttttggtcgacactggtcttttacatggcaagtcctgcttatcatcttggcagtggcaccgttggtttattagccattctcggtgcagccggtgcgcttgcagcccctgtgattggccgctttgccgatcaaaagacgccgcgatttattatcgcggtgggcctcttaatgatgactggcagctacctcttattccttttctggggacagtatttgccagttatgatgctcgggatcgttttattagatgttggtaatcagtgtggtcaggtgtccaaccaaacgcgggtccaagccttaggcgaagctaccagcagtcgtaataacacggtcttcatgtttgcctacttcattggtggggcttccggctcatttttcggcgctcttgcttggagtctcggtggttgggccgctgtttgttatctagggcttggctgccaaatcgccgccttgcttgttcattttgtgctctaccggcccaaagcaacacgctaaggttatgactcacgctagcgtttcccaaaatgttataataaggttaaccaatcaaatttggcttattaattcacaataaggaaggtgtctattatgaaattatatcaagctctaacacaagtaacgctcaacgcgcagatggttgatgatttagctggctttcaaattaaaccaatcttggaaaaaccgttaaacttcgatccaaccgacttgtatcattacatcgacacaaccttaaaagctggttcacgtcacgatgaaaataatctgctatttgtgaccgatgcgatttttattactgaaaactttaattttaaaggtaccgtttttgaagcctatgcccagagcttcgaagaacgcgtcacccttgcccaccaaattgtggccgacttaaaccgccacgtctcagtcaatatcgacttagcaaaacatgaattccaattagtctttgtcgattaatcactactagagaacctctggcatacattgtcaggggttcttttatcacgttgtttagaaagaagtcctatttttgcctaatgctcagcgccaaaacagcgccctctacaaattgacacgcccggctaatcaactcactgccgagcaacaccaactcaaaaccgccattattaatttttgcgaacaaaatcgtaatgcagatcacgccactttcttgattaaaggtgccgccggaaccggtaaaagtgtgattttaaacagcgtcttctcgacgctccaagaacttgcacgtaaaacgccgacttcaccgctgtaccaaaccaacaacaaattactggttaatcatccagaaatgttgaaactctaccaaaataacgttcaaccaactaacgcgctcttgaaaaaagactttcaacgcccgacaacttttatcaaccaggccagcaaacaagaaacccgcgccgatatcgttttagtcgatgaagcgcacctcttattgacgcacagcgatccttataaccacttcagacaggataaccagttagacgagattcgcaagcacagtcgcatcacgattctcatttttgatgaacaacaggtccttaaggtcaaaagttattggcaacaacaacaactactcgctaaactccaaaccgggccttatcaattagcacagctacaccatcaattccgaattcaagcaaatccctcggttgaatcttggttacaagcctttcacaagcagcaaatcgagtccttaccccaagatccacatttcgaattcaaaatttttgcagacgcagcccaactgtacgccgctattcgccaacgtaatcaagacagtggtttggcccggttactggcgacctatgattttccagcaacactcaatgatccacacgaccattacgtgagtgccccgcattttaaattacgctgggatcggtatcaaccaaccgccaagacttattgggcggaacgtgaagatagtattgatgaagttggttcggtttatacaatacaaggcttcgatttaaactatgccggcgtcattttaggcccgtcaatcggctatgacccacaacaagattgcttactgatcaaaccggaatactatgaggatcaagcggcttttgccggtgccaatcgctttgataatccaacccagattaagactcaaatcatcctcaatagcctctacgtcctgatgagccgggcccgcaacggcctttacctctacgccctcgatcccgctttacaaaaacgattattagcgttacaaacggcaacatttcccgggcaataaaaagcactttcctactcaaaaacaaaccaaaagtgtaaaattaaccctgtaatcaattctgttcaagaaggagtgctttttaaatgacgacattaacaacaacttatacgttagcaaacggcgttcaaatccccgtgctcggctttggaacttggcaaacaccagatggcgacacagctattaaatcagttaaggcagcacttgaagcgggttaccgccacatcgatactgcccaagcttaccaaaatgaagccagcgtcggcactgccatacaagaaagtggtgtggcacgccaggatctctttttaacaactaaaatttggaacgctaatcacagctacgatttaacaatgcaatctttcgaagaatcacttcaaaaattgcaaaccgactatgtcgatttattattgattcactggcctaaccccattgatttccgtgataactgggaaacagccaatgccgaaacttggcgagcaatggaagaactctacaatgctggcaaagccaaggcaattggtgtcagcaacttccgtgcacaccacttagaagccttgaaaaagaccgctaaggtgcaaccaatggtgaaccaaatcttcttagcacctggtgaattggaagctgaaacagtgcaatactcacgcgataacggtctgttattagaagcttacagccctcttggcactggtaaaatctttgatgtgccagaaatgaagaccctcgctgctaaataccaacgctcaattccacaaatcgcattgcgctggtcattgcaacacggtttcttaccattaccaaaatcagttcacgccaactacattcaagaaaatacgcaactatttgacttcgaattaacacctgaagacatgcaaactatcgatcaactcgatggtgttgttggtaaagccaaagatcctgatacagcaaccttctaaagatactctctctaaagagcagccgcgtgaattgacacgtcgtttgctctttttatatgaacagcctttaattaaaaaatgtcgtttacaaaatgtagtttacctccaccattaattatggtattttcattatgatatatcagaaaatcagacttatgaccgacgttatttaccgttgaacgttcgaaaatggtaagatagcattaatgatttaagaaatggggaattatattgtcaagtggtcagatatttaccaatctgttcgtcatgctcgttaccttctttctagcagcttttttcgttgctgcagaattcgcactcgttcaaacacgtccaagtgccttagaagatgcgattcattccggaaatggtagtcctaaaaaattaaaactcgcccttaagatgactcaaaatctcaatgagtatctttcaaccacgcaagttggggtcagtgttgcggggattatcttagggtggattggtgaatcaactgtcgaaacagtgttagttgacttattaggcttgacgcatcttgtctctgagagcggcctgcacattatcggcgcagtggccggtgttttagtcctaacctatttagaagttgtcttcactgaaattgtaccgaagaatatcagtatcgatatcccaatgcagatgttgatggccgtagctaagccacttcattactgtcacatcattttctacccatttgtctggttactaaatgtttccgcaaacggcgttgttaaactgatcggttttgcacctgctgacgaaagtagcgatgttttatcacaagctgaaatcatcagcctttctaaaaatgccgtaaccggtggtgaattggatcgtaacgatttagtttacatgcaacgggcctttgattttaacgatcgaattgccaaagacgtgatggtcgatcggactagtttatacgtcgtcgatattacggataccgtcaaagacgttgttaaggattatctccaacaaggatttagtcgcttcccagtggtcgctgaaaatgataaagataaaattctcggttacgtctacgcatacgacttggtgcgccaagcacaagtcgatgattcaatccgcgttagcaaattacttcgctcaatcatctctgttcccgaaacaacaccaatccatagtttattaacgcaaatgattaataaacaaacaccgattgtggtcgttgttgacgaatacggtgggacgagtgggattgtcaccgataaagatatttacgaagaattattcgggactgtcaaagatgaaatcgatgacgtttcggatgaatatatcatcaaagaagatgacaatcgttatcgcgttagcggtaaaacaacgctttacgattttgaacgcttcttcaaggcagatattgaagcctttgaagcatcagatagcgtaaccgttgccggttatgtcttggaaaacttcgctaacttacatcaagattccgttgtttcaattgaccgcttcgatttaacggtcgctgaatttaaccgtggttacattgattggtttgaagtttccgtcaatccacaacgtgcagatacaacactttaaaagtcaaaaaaggcgtcgacataattgtcgacgcctttttaatcgctttaaattagataatcgcggctccaaatgatgcccatcaccttttcaccagtgtgaaccccaacaactggtccgatatgactggtttcaattggcatccctgggaatttggtcgtcagggtctcaacccactgcgcactttcttctgggttattcccatcgattacgcacgcacgaatcggataatcagcggctgccacggctgcttcaaaatccgttaacactttttgaaaggctcgttttttcgtccgttccttggtcaacgcaacaattttgccagctgtatcgaaacttaaaattggtttgatccgtaataagttgccgacaaaggcggccccgttagaaatccgcccggtccgcatcagatggctcaaatcatcgacgacgaagtaaacaccgattgtctcccgcaaagcagccaatttaggcatgatggtttcagcgtcttcgccttgggccactagccgcgctgcttctaatgctaggaaagcttcgccagcactcgtaactttcgaatcaaatggataaactctaataccttcgacttggcgagcataagcttgcaggttattgataaaacttgtaatcccactcgataaatgaatacaaatgacttcatcgaaaccatcttcgatcagttggtcaaaaaccatctgcatttgccccattgtaatttgggacgtagttggtaatttatcggtggtgcgcattttttcgtaaaattcagtggttgaaatttcaatattttctaaataagtttgttgaccaaaaatcaccgtgatcggtacaacgatgatttgattggcttgcgcaacctgaggatcaaggtaagcggcgctatctgttacaattgccgttttcatgtaagactcctttgtaacactatttcttgccattatcccaccttaatcctgaaataacaagcaagcaaaaagcagtgtcgcctttggacactgctttttaaaatagtccctattctgttattttttcatgatcaaaaacgataattggcacccgattatcaacgacaccgctgttattaactaaggttaatacttggcgtttttcatctaaatcgaggacctcgtgaccgtcaaaatagtcggccgtatatgccttatagtgaatagggcccatttccgagtcaaacgtttctgtatagctctttagatccgcatcatttggtacaattaataaacgaaaatcagtatctaatgaacaaaaaccaacctttgagaaggggccgacaccgtcatttaagtcgagtaataatgcttgatcagtcgtcatctgtttttgaatcttctcttgagctgctgctgttatttttaataccatattaatcatccctttcatacgtttagcttaccaccatttagattttacacaatttatatgctcacagtgagtgtgctacaatagttatagtacttatctatccaggaggcgtttcgatgcttttttatcgttattcttatttcatcaatcaaaatgatttcgagttctatttcaaaatattactctcactgctcgttgggagtttaattctcattttctttgtccaatacctacgtcaccggtccgattcaaaatatcgggacctcttgattatcttcgtcttagtcggcgttttgctcggtggtattcagtatacaagagtggaacagctcaatactgcgcactcacaacaagcacaaatgacgcagttcatgaagagcattgctcaggcacagaaagtaccggtcaaatcggtttccgtcaatgccacttcgcttcaacaaaatatggtcgtcaaaattcatcagcactactatcaagtggttttcgacaataattttaccagttaccaactaaaaaaagcacaagtcatcaaccctaaaataacctaccaacaataaggagtcagccacatgccatcttatttagatatcacaattaaacttattctcggatttttctgcctcgttttacaaattaacctctctggtaagggtaacttagccccttccagtgggatcgatcaacttcaaaattacgtcctcggcgggattgtcggcggtatgatttataacgccgatatctcgtttatccaatttttcctcgtgctcttaatctggacgctaattgtcttcaccatgaaattcctaaccacacataatcaacgaattaaacgttgggtgatcggcgttccccaaacgattatcactaatggccacatcgatgcccaaacagctgccaaaaacagcttgtcagcccaagatctcgcttttaaactcagaattgccgggattagcgatattcggaccgttcaacgagcaattctagaacaaaacggccaactgacgattacccaaaaaggcgacgcaacaatcaaatacccactgattatggatgggcaaatcaacgtcgatgcattaagtttaatcgacaaagatgaagactggttactcgctgatatcgcccaacaagggtacgaactacaacagatctacatggccaattatctcgaccaccaaattgtcatcacggcttattaaataaaaaaaggtgcgggaacgaaagtcactttcgtcctcacacctttttttggttaacgaaccttctggaaaatcttctctagaatccacaaaacaaccccgcaaaccaatgtgatcaggctgatttgccaagcgtaatccaaaacgcttgttgcatagttaataatgactgtattgaattcaccagcacgttgggcaacttcttcaattaagccactgaatttggccgtttcagtccctaagaggaggaataagccactccaagcaagtgctgcgcccaaactcccgaataggtagcggaacttcccactgactgcatattggacgattaataagacgatccccatgataatcgcaatccacatccctatgttaacgacacttgtcatgatggccaattcagaaaccattggtgccaaataaggcgtttgaatttgatcatttaaataagtcttcaatggtggttgaacagccgccaccgccgttttgactaaagcttgttcaatggggttgctgggaatcgccgctgttaaattcccagccatttgttcaaccatttgatcactatctaatggccgatctttgaacgcatagatgttcttaacggtcttagtcatatccgttttaacgtctgcagttgagagcaattggacttgaaccgattgcggtaagccatttttttgcgccgcatctaataagactgtattgaattcgtttgtcacgagtttcaaggtcttcggctgattaagttgttcttgggtgaatgattcttttaagactgtttgatttaaaatgatgccgccaatcccgaagaaggcacagcaaaaaattaaaaaagtcagaaaacggctgagacccttattcggtcttgtcgtctttggcgtttgatcaagtcgactcatatttgtcatcgtatttttcctttcgatttcacagttatccttaaattttaagactaggcatatcaattattaaatgctacagtgagtatatagtatcgttcacaggaggcacttcaatgatcactaatctatccattttatatatttcactagctggtaatacccgttcttttgtttccgatttacaagactatgcgcaacaacaacataccactaacccggctttgcctactatttcattaactgagatttcagatgcaaccccctttaaggatgaaacagaacccttttacgcttttgtgcccacatacttagatggcggcaatggtatcgataacggcgtcaaagaattgatgaccaacagcttaggcgaatatatcgcttatgggcataatgctgatttatgttacggcgtgattggcagtggcaatcgtaatttcaacgaacaatattgcttaactgctaaacgctatgccgaacagtttaacgtccccttcatcgcggattacgaactccgcggtaactcacgtgatgttggccgaatctacatgttattagtcgctaatgcgcaaaaacacgcttagagcttcaaattagcgggtaacgtcgtaattaaatcagtcggttgggtcacaatttggaccgcaccggcttttttcagttcggcgatactcccgaaaccataactgacaccaacagccgccatttcattttgttttgtttggcaccaaggatatcattttgacgatcgccgaccatcaagagtggttcggtcttcgttaataaaccaagttctgccaacgcataagtgataacatccgcttttttaacccgcgttgtttcatcaacacttgcaccgtagacaccgctaaagtaaggcgttaactctaagtggtcgataatcttcttggcaaaaggttcaggtttagacgttgcaatcgccaattgtaaatcttgtgcttgtaaggctgccaatgtttcgtgcatgcctggataaagttcattttcatataagcctttaggcgcataatattcttggaatgttttaatcgcctgttgcgtcgctgcttcatctaaaccaaagactctcatgattgtttcgttaagtggtgggccaataaaactaattaattgggccgtcgtttgcgttggcaaggccaattcttcaatcatgtactctaaggcattgataatgcccttttgtgagtcggcaatcgtaccatctaaatcaaataaaactgttccttttgtcatcgattctcatcctcaatccctttgaatatactttattttagcatactatttttaccttaaactttccttattctttttttcataaatctataaagtgcgcttcacagaatcttcacatttccccattatagttatgagtatagaaaagcgatacttttctatttcatactacttaactttttcattttactcctccaaagtaaaataccggtgaagcgtggcttcaccgcacagattatccccccaaaataatctgtaaaacccttactcctttttagatcttcggatctgcaaaaagtcggtccccccaagaccgactttttgtttgcataaaaatagctagcgattaaaccgacatcggccaatcgctagctattttttatttcagatgggcctgcataaatgtgacggtgtccagttgggcctcgtcagatactttatgttgaccattattttcagtcgtcaatgtaacttgttttgttgccggtgtttcatcttcagtaatctgcgtgatgaaatcagcagtaaattggtagggcaccattggatcagcggtcccgtgataaaaatggagtgggcgacccgctaagcgctcagcatttaatgccaaatcatattctgctaaatctgcgagtgtcgtttcaatttgattttggtaccgttcttgaatcgattgtggtaattgactggtttgccatttggcaaaagcaaccggcattggtgagccaatcttatcaacaccgactttaacgttgggataatgagctaaaatagcatccgttgtaatcccacccattgatgtgccagtgacacccaggcgttctgggtcaactaagccttccgcttgtaatgcagcgactaatgggccaaattcatcgactgattgcatcacaatctgccagaattcaaacattaattctgaaaacatttggctaccgtgacgtttaccatgatacttagcatccggtaaaacaacccgaaaacctgctttagcgagaaagttagccaacatcaattcagattccttccgatgcgtccaaccgtgatagacaaataccgttggtaacaaggtttgttcttgcccacccggcgtcacaattaacgtgctgacggcgccaaattggcgttcttcgatactaatcattcatctgtctccctctttttaatttcccgggcaatactacccgaagaaagtgccggtaatcttataacgacgcttgatatagatccggactacgattaataatgccgcaatcacgatttgaatccaggctggtaagactgggttcatgaaacctggaattaagattgtcaccccatacgcggcgacaaaggccaaggttaaaccgacaacgattaacgccatcttccagaatggtgggcgttgttccttaggcatttgtgtatagcgcattggataagtcatgataacgccggccatcgcagctgtaatcacgattgaggtaatcccaatcattgcatttgaattcttgcttgaaaattgcgctgcaatcccgttgaaagctaaatacataatcaagaaaatcaaagcattatccagcatttgtaattgtaaactcgttttaacgggtgcttttggcgcatgtaacaattgattaatcttcgtgctgactggcccgtaaatttgcgttgcgggttgtcctttgtgttgtgcttcaagcatttcgggtaacatttcagcaagcatttcagcttgtttttcgtctgaaacatcttcttcttttaaagcacgcttgaatttaaataaatagtccgcgtttttcttgcttaattgtttactgagcgcgtcaacatccacttgctctgtttctactgctggttctgtcttagccaattgttctcctcctcaaattaaacgttgaatctgaattcgataatgtcgccgtcttcgaccatgtattctttaccttcaagacgtaaacgaccagcttctttaacagcttgcattgaaccgtattggtcaagatcagcaaatgagactgtttctgcccggatgaagcctcgttcgaaatcggaatgaatcacaccggcagtttgtggggctttcatgccttgacggaaagtccaagcacgggtttccttgccaccagcggtaaagaaggttgcaagccctaataggtggtatgaagcacggattaatttatccaaacctgattcagtaacgccttctgcttctaagaattcagctttatcagcgtcatctaatgaggcaatttcttcttcagttcttgctgaaatcgcaattacttctgcgccttctttagctgcaaaatcttgaatttgtttaacgtaatcaacgctatcaggatcggccattgcatcttcagcgatgttagcaacgtataagactggttttgacgttaataggaagaaccctttaaccatcttagcttcgtcttcgttaaattcgattgaacgaactgagccgccttcttcaagaacgggtttgattttctttaaaacttcaaattcagccaaagcttctttgtccttagtgcgggcaatcttttcaacacgcgcataacgctttgtgacgctttctaagtcggctaagctaagttctaggttaattgtatcgatatcgtctaacggatcaacagtccccgttacagacgtgatattatcatcgtcaaaagcacgaacaacatgcacgatagcgtccacttggcgaatgttttccaagaatttattccctaaaccttcacccttgctagcgcccttaacaatcccggcgatatcggtaaattcaaaagtcgttggaacaatcttcttagcgggaatgatttcttgaatccggtctaaacgtttgtcgggtacttcaaccatcccaacgttaggatcgatagtcgcaaatgggtagttcgccatttcggctccggccttagtaatggcgttaaataaagttgattttccgacgttgggtaacccaacaattcctgcagttaatgacatagttttttacactttcctttacgttaaaaattagtttgattgggaccttttgacaacaattgataatgtggttccgttgttgtatcaacatcggcagctgcaaccagcactttcttttgcttcttttcaaattcccggcggggtaataagaccgcgtgtccgcagcccatacatttaattcgaatatccattcctaagcggaccacttcgaaacgattggtgccacaggcatgttgttttttcatctgaacgagatcgcctaatgcatacattacaaatgtctccttaatctaatcaatattgacatctagtaaagccaagattcggtttaaatcctctaccgtgccgtaatcaatttcgattttaccccggcccttactgttcatcgcaatattaaccttggtatcgaatttatcgactaattggttttcactcgcttgaatgtaaggtgatttaatcttagtcttagcaactttagccgctttggtttgattcatttggttgacgagttgttctaattggcgcaccgttaaactttcggcaatcgtccgcttggcgagggcgctaatttgactctttttcttcaatgataaaagcgtccgtgcttgtcccattgagagttggccttcttgcaacaattgcttaacatctgctggcaagcccaacaggcgtaagtagttggcaatgtaagggcgactcttgcctaagcgttctgacacttcagcttgcgttaagtttaacttcttcaaaagggtgtcataggcttgtgcttcttctagcggtgttaaatcttcccgttgaagattttctaagaccgcaatttccatcatcgcttcttcatcgaattgacgcgtaatcgctggaatcgtagttttaccagctaatttagaagcacgaaaacggcgttcgccagcgattaattcgtaaccattaatgcttttacgcacaataatcggttggaaaacgcctgattttttaatggaagcagcaagttctgctagtgctgcctcatcaaacgttttacgtggttgataaggattgggacgaatatcctcgagggcaatctcttcaacgagttcatccgcacgattcttattgggtccttcaaatgctgaaaaaacagcttcgagtcctcgaccgagtcctttaccatttttattgaccattagctgctaacacctccttggctaattcttgataaacttcagccccacgagatttaggatcgtaatcaatgattgaaaccccatgactgggtgcttccgctaatcgtgtgttgcgtggaataattgtatcgtaaacgcgatcgccaaagtacttgcgcacttcttcaatcacttgggcccctaggtttgtccgggcatcgtacatcgttaataagaccccttcaattgcaaggttcggattaaaatgcttctgcaccaaacggaccgtatttaataattgactcaagccttctagcgcataatattcactttggactggaatcaaaattgaattgctagctgtaaaggcgttgattgatagttgtcctaatgaaggtggacagtcaatcaagacgtaatcgtagtcgtttaaaacggcttctaaaccaagttttaaacgcatttcacgggccatttgggccgttagttcaatttctgcaccggctaattgaatcgttgccggcacaatatcaacgtgctgatgatttgttttcaaaattgcttctttaattggaatttcatcgactaaaacatcataaatatctttttcaacttgtgatttttgaatcccgataccgctcgttgcgttaccttgtgcatcagaatcaatgattaacactcggttacccgcatctgctaaacaaaccgctaaattaatggtcgttgttgttttaccaaccccacctttttggtttgcaattgaaataacatgcgccataatgtgcctccctatttcttaggaatttcgattgtgatccgataaacgtctttttgatcgtcttcgactgctgaaactggaatcccactttgttcaatcaattcgattgattttttgatggtattaacggccactttcgtgtcagctgtcgtcatttctttcttaggcgccttcttcttgccagcctttttaggtgtttctgttgattcttcaatggttgctggttcttcttcaacatccgccacttcttcttcaacggctggttctgggttaataattgaagcgactagggcttctgtatccttaaccgttaattgttccgctaggatttggtgtaagaccatttgttgattgaattcatctaatttcaacaaactccggccatgacgttctgaaatttcatgattcatgatggcttcttgaactggttgtgagagtttcaatagtcgtaatttattagcgacaaatgattggctcttacccattttttcagccaagctagcttgtgtaaaaccgtttaacttcatgaggttttggtaagcatctgcttcttcaactgccgttaattcttcccgttggaggttttcaatcaaggccattgaagctgtttcatgatcatccatcttttggacgattgctggtaattcagcccatttcaaggtttgaatggctctaaaacgccgttcaccagcgatgatttcaaacttttgatcttcatattctcttaaaacaattggttgtaataaaccatgttgttcgatggtgcttgccaattcaccaatgtgatcggcattaaaaaccttccgtggttggaaacggttcggtacgatcgcagcaactggtaccattaccacctgattaacacttgaacttgtttcttcttttttcttaccaaaaaatgaaattgccattatttctcctccttagccattaatggttttttaaccggcacacccgcgcgccgtggatatttatctggtgttgattgaaccttatcgataattactaaatgtctgggatcgttagtttcgggtaagttaaacgcgatatcttcttttaactgaccacctaacgtctcaattgcaaaagcggcttccgctaattcagtgtcactttgactcgcctttaaagcaacgaactgcccacccactttaacagcgggtaaacagaattccgctaaaacgttcattggggcgaccgcacgagctgtcaccatatcaaattgttcgcgatatgggcgcttaacttggctgaataattcagcccgatcatgcacgagtgtcacatcagttaaccctaattcggctactaattcttctaggaagtgaatccgtttatttaatgaatcaacaatcgtcacctttaattgagggaacaagattttcatcggtaatgatgggaacccggcaccggcaccgatatcacaaatattgaggggcatcgttctcaatgattccaagtataaggttggtgcgaccgaatcaaaaaagtgttttaaataaacggcttctttttctgtaatcgccgttaaattaacgttttgattggtagccactaaccgttcgaaataaatctcaaactggtctaattgtttttgtgaaacatcaatttgatgttctttcaatgtcgcgacaaatgtctttggtgtcattgcttctcctcttattactagcttaattgtatgctgaatctgtggaacatttattgtttcacgtatacaatttagtttaacgtaagtaagtctaaaaaacaagggacggccatcaatcgattccgtttcatgtggaacaaattttttccgaatattaggaacattttacagtgttattcgttttaacattcagtaagtaagcagttttatcagaatgtggcgactaccctatcatttaaaggcgaactatcgctagtttatgcgattattatattcgttttttagtcatattctaattgaagtcgcccaaagcgtgtgctaaactggatattaaataaattttaacctatagatatggagggacacctgtggcagatttccagtccgactcagcacgtactattgaaccagctccaaagctttctcatattaaagcggccattttaggcctgcaacatcttctagcaatgtattctggtgacgtcctgattccattattagtcggcgcagcacttcactttaacgccgcacagatgacttaccttgtctctgtcgatattttcatgtgtgggatcgccacgttactccaattgaaacgaacacctttaaccgggattgctttacccgtcgtcttgggctgtgcggtcgaatacgtcggtccactaactgctatcgggactaacagtcaattagggattgacgtcatgtacggtagtattatcggcgctggggtcttcatcctcttaatttctggtgtggttgcccgcttacgctggttattcccaccaatcgttactggttcattaattactttaatcggcttcactttaattcccgttgccttccaaaatcttggtggtggcgatattactgctaagtcatttgggagcgtcccaaacttaatcgctggtttttcaacgattgttctgattttaatttttagtatttggggccgcggcttcattcaacaaattgcaattttaatcggcattatcggtgggacattagtcggcgctgctgtcggattggtttcacttgatccagttggccaagctagctggtttaaactaccagaactcttctacttcggtacaccacggtttgaatggacgtcaatcgcatctatgtcattggcagccttaaccacgatgattgaatcaatcggtgttttcttcgcacttggcgaaatcgtcggtcgtaatatcacaagtaatgacttaaaacgcggcttccgcgctgaaggattagccgcaatcttaggtggcttgttcaataccttcccttattcaaccttctctcaaaacgttgggattgtgcaattatcaggcatcaaaacaaagaaacctgtttactattcagctttcttcctcatcttcttgggtctcttacctaagattggtgcggttgccacgattattccaacctcagttttagggggcgcaatggtcgtcatgtttgggattgttgggattcaagggattaaaatgctccacaaggttgatcttgaagacaaccgtaacctcttagtcgcaaccctttcaatcggtatgggccttgggattgccattcacccaaccttactacaagctttaccagctagtgtccaaaccattcttggtaacggcttagttgtcggcagtttaacagcggtgatcttaaacctccttgttaactaccgctcgttaattgaagcaaaacatcaacaataagcatataaaaagcgtcagacaaattaatttttgtctgacgcttttttcgtactatctaaaatgtgttctgtaccccatatactgagggttacgacgcactcttgatctaaacgtgctttttcaggcatattgttgcggttaactacgtcccgcaaacaatcgactgcgtcgcttattcacggtactaggttaagccttcacaatataaacacctgaaacgcactctttatttaaacgtgctttttgaaactgacttttgcgcttagcgtcacttgtcaaacaactgcctacagtagttattcaccgagctgtgctaatgctcaaagtcaaaccgtctcaaacgcactcttttagtattcaccttgcgaatacgatattgacgagaacttattataggttttaacgaataacagctttaccgtgccccgtgcgccggcccggtttttttcgataattacttcgacctcaccgacatccgcattttccggatctggtgctggttggctgccaccatcctcgccgtcttcacctggttcatcacgataataatcatcacgatacaagaaagccacgatatcggcatcttgttcgattgatcctgattcacgaatatcagataatactggtcgtttatcctgacgttgttccacgccacgagaaagttgtgataaggcaattacgggaacccgtaattccttcgctaactttttcaattgccgagagattgctgaaacttcttgttgccggttttcttgaccggaaccttcaatcaattgcaagtaatcgaccacgattaggccaataccatctttttccttcgctaaacgccgacatttagcccgaatttcagccattttcacgccgggtgtatcatcgatataaatattggctttcgacaaactgcccatcgcaataatcagattttgccattctgattcttctaattgaccggttcttaaatggttggcatcaatactgccttctgcacacaacatccggttaaccagttgttcggcacccatttccaaactaaaaatagcgacgttttcgttggtcattttgccgatattttgtgcgatattcaagacaaaggcggtcttcccaaccccaggacgagccgctaagataatcaattcatcttcatgcaacccagccgtgatcttatcgaggtctggatagcccgttgaaagaccggtaatactttcttcttcttgatagagcttatcgatatgttcaatcgacgtggttaggacgtctgaaattgatttgaagccggctttattttgctgttcagaaaccgccatgatctcttgttcagccgtatccaaaatatccgtcacgtcttcatcttgcgcgtaacccttggcgacaatattttgtgccgtttgaattaagcgtctaagcatcgctttttcagagacaatcttcgcgtaataaaccacgttggctgcggttggtactgcatcggctaattcagccaaatagccaatcccaccaatatcttccaattgattgcgggcatcaagttcactcttgatcgtcaccgcatcaatgccttcgccccgttcatttagttcaaccatcgtttcgaagattaggcggtgcgccttacgatagaaatcatcggcagtcacgtattccatcgcttcaactaatgcgtcgctattaatgaaaacagcgcctaaaaccgcctgttccgcttcattattctgcggtggcgtatgttcgattagttcattattcaccattttatctccttttggcttgtttgcgttattgcatctagtttacttaaatttctctccagatacaacctgtcaccataataaaagaccgtgactttgattgcaatcacggtcttttggataattaaaaaatttattctgcgacgatgtgcacccggattgtcgctgttacatctgggtgaatccggacgtcaacattgcgataaccaagcgctttgattggttctggtaaatcaattttacgtttatcaactttgattttgtattgttgttctaaggcttgtgcgatttgtttgcttggaattgaaccgaataaacggctgtcttcgccagctttagacttcacttcaacaattgttttatcgtcttcaatcttcgtctttaaaaccttagcttctgctaattcggcagcggcattcttagcttcagcgtgttgttggccttttaaagcactgacagcggctgttgtggctggtttagccttaccgtttttaattaagaagttttgtgcgtaaccatctggcacgtctttcacttggccctttttacctttaccgcgtacgtcttctaaaaaaataactttcattacgtttaccacctttttaattaatcgttagttgcgttttcttccgcttcttctggatcaaataattcggccagaacggctaataacttagctttggcttctgaaaccgtcgcatccttcaattgggttgccgcgttggataagtgaccaccgccacccagtttttccataatcacttgaacattgacgtcccctaaactgcgtgccgagatggcaatcatgccgtctgggcgtttcacaataacgaaggccgcttcaatgccggataacgacaagagcgtatcagctgcttgagctgcaatgacgggatcataactgcgattgtcttcccccatacataatgccatattgtcctcaaccatttcaatggtttcaatcaaatgattcttttgaatataattatcgacgttttcttttaacagatgttggaccattgatgcgtccgccccgacagaccgcaagtaactagcggcatcaaacgtccgcgtcccggtccgcattgaaaacgactgcgtatcaaccgtaatcccggctaacatcgtagttgcttcgaacttgttaatgttggccacgttttgtggttggtattcaaacatttcagtcactaactcacacgttgaagaggcgtagggttcgatataaaccaacattgggttttctgggaactcttccccgcgacgatggtgatcaagcacaattgtccgttgcgccaatttctcatacaatttaggcgccatcgtaatcgatggtttagaatgatcaaccattactaataaactgttagccgttgccttttccaccgcttcttcaggtgaaaggacttcgactgcaatttccggataaaccttaacctcttccaacaagcgttgaatatcggtatgaatattattttgatcaaccacgacatgacatttcttgccgttcatttcagcaatccgtcgaatcccaaaggacgcaccgagcgcatccatatcaggccgaatatgccccatgacaaagattgaatcgacctgcttgaaaacttcctgtaaggcttgcgaaatcatgcgcgcacgcactcgagtccgtttttccatcgggttcgttttaccaccgtagaaccgggcttgcccatcgttggccttaacgaccacctgatcaccaccacggccaagggctaaatctaaattactctgagaagtcgtcgctaaaacggctaaatcagattccccataggcaaagccaacactcaaggttaacgggaagttttgttttgaagtttcttcacgaatctcatcgagaatcttaaacttctctttttcagccgcgtggagcgacttggcgtaggcgaggacgaagaaatgatcatcatcaacccgttttaagaacatttggaactgattagcccaccgagagagctcgttagtgacgtagttattcagattagaaatagcttgatcatccattgtttgggtgatttcgtcataattatctaaaaagacttggccgattgcaacctgttcgtcttcataacgatcttcaatcgccgcataacgcgtgatatcgagaaggtaaaccaccccgatactttcttgaatgataatctggaattgattatcgccccagtgaacgagcttagtttcgttggaatcttcattttggacgactaattcggccaattccggatcgacttctttaatcgtttttccaaggacttccttattccccaagtattgttgtaaataaggattggtccattgaatttcgcctttttcattgtagagcaaaattccgattggcatcttgattaaggcctcttgttcgcctcgtttaatccggtaggacaaatccgaaacatacttggcagtattttccgtgaccgtctcaatcgcgtacaagacggtgattaaggtcccaattaagagcacgaacaaaatcaaagcgatgagccaatttaacatcgctgcaaagatcaggctgacggcggtcaaccctaataagactagggccaccatccgcaagcgcgcatcatctaaaaactgcggtaattttaattgcttaattttatttttcatgtaaactccttaactctaaagaaacaagtattttaggcagcacatcttgatttgaacaacttggttctttactaaatcttaaagaatcatactttattctagcacaaataccaattaaaaaccgctctcagcccgcaatttaatcccatgttcgcctcttggaaactaaaaaagtcaccaaccaagtaaacttggttgatgactctaaaattaatttttagtcttctgtaacgaatggtaataagcccatgatccgtgcgcgtttgattgcaattgtcaaacgacgttggttcttagcacttgtaccagatacccgacgaggtaaaatcttaccacgttctgagataaaacgtttcaataaatcagtgtctttgtagtcgatatattcgatgtggttagcagcgatgaaatcaaccttacgacgacgacggttgccgcctcttctttgttgagccattgaaagttcctccttccaaaacagtttattttagaaaggtaagtcatcatccgaaatatcaatcgcttgaccattatttgcaaatggatcggcttgagtgttatttgcggctggtgcgttacccgtttgttgagggctggtaaatccagattgttggctaccattgctttgattactattaaagttctgacttgcgccatcaccttgccgttgctctgttgttgtccgtgattctaacaatgagaaattatcgacaaccacttcagtcacgtagacacgttgaccttgttgattttcataatttctagtttgtagacggccatcaacccctactaatgagccctttttagtaaagttagcgaaattttccgctgatttacgccaaatgacacaattaataaagtctgcttcacgatcgccgttagcgttcgtgaattgacggttaactgccattgagaaagtcccaactgcagcaccactagaagtgtaacgtaagtcaacatcgcgtgttagccgaccaacgagtacaactcgattaatcattctgtcagctcccctctattcaatattacaattcaaaattagtcttcgcgtttaacgatcatatgacgtaaaattgcgccatcaatcttagctagacgatcaaattcgtttaaagcttcatcattatcagctaaaacatttacgatatggtaaatgccttcgtgttgattgttgatttcataagctaaacgacgttttgaccagtcttttgaatcaaccacttcagcaccgttgtcttttaagatgccgtcgaaacggttgacaagggctgttttactttcttcatcaagtgttgttgagatgatataagtaacttcgtattttgattgagccatgactgttcacctccttatggactttaggttcttacctgtgtaagaacaaggagtaactgactaatattactattagcctcacgatttagaccctgtgcctaaatcacagatactcacaagataaaagtctatcataaatagcacgtaaatacaaacttaaaaaaaatcgtttttgctaacacgcttgttaatccttacaagtgtaattacgcaaaaacgatttttatttttttaaattagtcgttatttggttcgttttgattctcttcagcacgggctaataaatcatcaacttgtgctaagccagtgtccgtcacgttttcagttggcactgttggttcagtcgttgcagtttgtgtttcaggttcatctggttcagcttcgactttggccattgttgccaccttcgcttcgtcatccacacgaatcaagcgcacaccaagtgttgcccgaccggtttgtgacacgttagccaccttgaaacgaatcaagacgccggtatcagtaatcaagagaatgtcttcttcaccagttactgctgcaatcccggctaatgggccattcttttcagtgatattggcagtcttaatccctttaccaccacgacccttgattggataatcgctaacggctgttcgtttcccgtaacctttttcagaaatcactaagatttcttggcccggaatcaacaagtcagaaccaacaacgtagtcgccttcgcgtagacgaatcccacgaacgccggctgctgtccgacccattgaacgaacggctgtttcactgaaggaaacggcgtagccattatgcgttccgataaagatgttttgttgaccatcagtcattaagacgttgctcaactcatcatcttcatgcaaggtcaaggctttcagaccattgctccggatattggcaaattcgccaacggccgtccgtttaaccgtccctaagcgggtaatgaagaacaaggcttgttcaggcttgacttccttaccgatattgaccacggtttgaacgcgttcatccgaattaatccctaagagattaataattggaatccccttggctgttcgaccgtattctggaatttcataccctttagcacggtaaactttcccagtattcgtaaagaagaggagcacttcatgcgttgaagttgagattaagtgttcgatgaaatcatcatcgtgaacacccatcccttgaattccacggccgccacgattttgaactttaaattcactcgctggcaagcgtttgatgtagccgttatgcgtcaaggcaatcactacatcttcttcttcgattaggtcttcatcttcgatactgaggacttcgccgaccaataattcagtccgacgtttgtcgccaaatttactttgaatttctaacaattcatcataaatgattttcttaatccgttctggtttggctaagatatctttcaaatcagtgatcaacgccatcaaattattgtattcattttcaactttgtcacgttccaaaccggttaagcgaacgagtcgcatatccaaaatagcttgggcttgtttgtcagataagtcataacgttccatcaacaagactttagcggtatcgccagtctttgaactccggatgatttgaataatagcatcgatatgatccaatgcaattcgcaaaccggccaagatatgggctcttgcttcggctttcttcaaatcaaattcagtccgacgacgaatcacttcttcttgatgcactaagtagtgttcaagaattgattttaagcttaagacttttggggcaccgttaacaatggccaccatgttgaatgagaatgaggtttgtaatggtgtgagtttgtagagattatttaaaaccactgaagcactcatatcacggcgaacatcaatcacaatccgcatcccgtcgcgatcagattcatcgtttaaatcggtgattccttcaagacgcttgtcccgtgctaattcggcaattctttcgaccaattttgctttgttgaccatgtaaggaatttcagtcacgataatccgttcacgaccgtttttcttaacttcaacatcgactttggcccgcaacgtaatcgtccctttgccggattcatacgcatgacgaatgccagatttacccattactaacccaccagttgggaagtcaggtcctggtaaagcatccatcaagtcggcggttgttgcatcaggattatccatcaaaatatggatggcactgatcacttcagccaaattatgcggtggaatattggtcgtcatcccgaccgcaatcccggttgccccattgactaacaagttcgggaagcgcgctggtaaaacagcgggttcgcgttctgattcatcgtagttaggcacataatcgattgtatttttgttgatatcgcgtaacatttcaacagccattttactcatccgggcttcggtataacgcatcgcagccgcgccatcaccatcgacagacccaaagttcccatgaccatcaactaacatgtaacgataactaaattcttgtgccatccgcaccattgcttcataaatcgctgaatcaccatgtggatggtacttccccataacgtccccaacgattctggcggacttcttataaggtttttcaggggtaacccctaattcactcatcccgtataaaatacggcgttgtacgggctttaaaccatcacgaacgtctggtaaagcacgggcaacaatgacactcattgcgtattcaaggaatgatttacgcattgttttagataaattgacgttttcaatccgaccatcttggccattttcgtttgccattaatctattaaacccctctcagtcagtcttcattgatcagtagattactacgcatcaatactctttggatccatgtatacggcattttcttcgatgaataggcgtcttggttcaacacgatcacccattaacatttcgaaaatttggtccgcttcttcagcatcttccacgttaacgcggagcatccgtctgttttcaggatccatcgttgtttcccataattggctggcatccatttcacctaaccctttgtaacgttgtacttctggtttaggacttggttgtagggtgcctaagacatcttgcaattcttcatcagaatcgatatagcgcatcatcttaccttgtttaacccggtacaaaggtggttgcgcgatatagacgtagccagcttcaacgattgggcgcatgtaacgatagaataacgtcaataataacgtccggatatgggcgccatcgacatcggcatcggtcatgataatcaatttatgataacgggccttttcgacatcgaattcttgtccaaagcctgttcccatggccgtaaagagcgtccgaatttcttcattcgctaagattttttccatgctagctttttcaacgttcaagattttcccacgaattggcaagatagcttgcgttaaacgtgaacgacctgatttcgctgaaccgccggcagaatccccttcgacgatgaataattctgagatttcaggatctttactactgttatcagctaacttaccaggtaaattagagatttcaagaccatttttcttccgtgtaacttcacgcgcgcgtttagcagctaagcgtgctctggccgccaatgagcctttatcaacgatttgacgagcgattgatgggttttccatcaagaacttcgtaaagtgatctgagaacatccgatcagtaactgaacgagcatccgcattgcctaacttcgtcttagtttgaccttcgaattgaggatctggatgtttaactgagacaacagccgttaacccttcacgaacatcttcccctgaaaggtttgcatcacttgctttgaagatattttgctttgttgcgtagtcgttaatgacccgtgttaaagccgtcttaaagccggattcatgtgtcccaccttcgtaggtatggatattgttggcaaatgttaacaaattggtccgataatcattcgtatattgaagcgccacttcaacggtaatcccgttttgttcaccttcaacatagattggttcatcaaggagtgtttccttcttttcgtctaagaattcaacgtaactcttaatcccaccttcatagtggaattcaagtttttcatgggtatcagcccgtttgtcggtaaacgtcaattttaagcccttattcaagaatgctaattcgcgaatccgggtcgttaaaattttatcgtcatagattgtcgtttccgtgaaaatatcaggatctggcacgaaatggactttagtcccatgttcatgttcgggtgcgtcgccaatcattttcattggtgtttgaactttcccacgtttgaaatcgatgtaataacgcttgccgccttgtgtaacaacggcgtctaattcggttgacaaggcattaacgactgaggccccaacaccatgcaacccaccagaaactttgtacccgccgccgccaaatttaccaccggcatgcaaaatcgtaaagacggtttctagcgctgatttacccgttttggcttgaatcccaactggaatcccccggccgtcatcggtcaccgtaatactattatcaggttcaacgacaacgttaatttcagtcgcaaacccagcgagcgcttcatcaattccgttatcaataatttcccaaaccaaatgatgtaacccttgggaactagttgtcccaatgtacatccctggtcgtttacgaaccgcttcgagtccttctaagacttgaatttggctcgcatcataagatttggcccgttcttcttttgcctcaatttgggcttctgtttctttgttcaattgatcatctgccaagaaaaatacctccatttgatcgtcttattatgccaactattctgcttgttcttctatgacgaccccgttggtgactgtaaacacgcgcggtgtcgcaataatttcttttttaacattctctaaactggttgtcgtgaggaatgtttggactttgttttggaacgtcttcaacaaatgtgtttggcgtaaatcgtctaattccgacaacacatcgtccagtaataaaatcgggtattccccggtttgggccttcatcaagtcaatttcggccaatttgacactcaacgcggttgtccgttgttgcccttgggaaccaaaggcctgcacatccttatcgttgactaaaaattgaacatcatcgcggtggggaccaatcaacgtcgtgccttgttcaacctcacggatttgttgtttctcatacaaggtttgaaattgttgatagagttcttcgacactttgatccaattgttcttctggaatctgactttgatatttaaacgtcaagacttcccgatccttcgtaatctcctgatgcaatttttgggcccatttttccatttgttggagaaactggcgccgggccacggtcacttccgccccgtaagccgctaattgatccgataaaacacctaaataaacaagatccttggcttggcgccgttggagttgcttaagatattgattacgttgtttcagaattgatttgtattgcgaaatattatagagatacttgctactcatctgcccgaattccatatcaatgaaatgacgtctcacagcgggcgaacccttaacgatgtttaaatcctccggcgcaaataacacgacgtttagctgaccaatatattgtgataacttggcctgttctaaatgattgaccttcgcctttttacctttttggcttaaaacgagttctaacggggttttccctgcagaacgttggaccaagccggtaattttagcgaaatcttcatgccattgaattaattcgcgatcggtattcgtgcgatgtgagcgggccaaggctaaaacgtagattgcttctagtaagttcgttttcccctgcgcattttcaccaatcaagacgttcgtatccggtgaaaagtgcacatcaactgactcataattacgataatgattcagttgtagttcgcttagatacatagctgcctacaatctttcttgttgtttaacgatgaattggccgttatctgggacttcaatgacatcctctggatataacttccggccacgtcgatcatcaggttcgccgttgactaaaaccgtattttctcttaggaaccatttggctttgccacccgtttcaataatgccggcttcttttaggagttgtcctaatgtgacgaattcagcctcaagtttaatttcttgtgtcatattaacccaccattcttaacgatattaattactggaaaaataacgatccgttatacctagtaattatagacttttttagcactaaaaacaaataaacatggttaaaatgctttctcagcgtttttgacaaaattacccctctcctactagaaatatcttaaatcgctgtaatcgaatttattttaattctagttcacaaaaaaacgcctctcatcgaggtgtttttgagttgttatttaattttagaatgtccggactggtgtgatcaattgaatatagtgttcttgatcttcacttggaaccaacgtaaatggtcgtaaagcagccgtaaagttaatcacgattgttgtttggccaaatgaacgcaaggcatccttcatgtagtcagggttaaatgaaatttcaagggattcacccgtgaggttttcaaattgaagggcttcttcaacattccccacatctggtgaattaccataaataatcgctgtgttagcctctgtgtcgagtgttaaacggacaacgttattccgactttcatgggataacaatgacgcccgttcgatagcggccaataagactggcgcgttaaattcgatttgggtacttgatgaagttggaattaaacgtgctgtatcaggatagttaccttctaataagcgtgaataaaaggctaagttgccagctttaaagaggacttggttttcagcaatccgaatttcaacgtcttcggcatcatccgcaagcgttcttgaaagttctaccaaactcttaccaggaatgatgacgtcataattggcatcacttggaagcgcaactggtaatttacgttgtgctaaacgatggctatcagtcgcaacggctaacatttcgccattggctaggaccaagtggaccccagttaagattgggcgactttcttgattagaaacagcgatgacggtttggtgaatgagttgtttcaaaacatcagtgctgatgctaaatgtattttgccctgcaatttcaggaaggtgtggataactattagcgtctaacccgttgattgtaaattctgatttaccggagcgaattgttgtttggaaattatttccaactgcaattcgcatctgatcttctggtaattttttaacgatttcactaaagaaacgtgctggtaacacaatttcgccaacttcttcgacgactaattggtttttttcatctgaggctgacaatgttgcttcaattgagatatccgcatcactaccggttagcgtcaagccttcttgcgatagaacaagtttaagccctgttaggatcggaatcgttgttttagctgaaatggcccgttgcacatcattgagcgttttgataaatagggcgcggttaattgaaaatttcataggtgctacctccgagggtgaatattatatatatattaaaagattttaaagtaatagtagtagggcctgtggaacctgtggataagtattgaaagccaagaatctcatagttttccacctgtggataaaatgtgagaaatccttaggataacttttacctttatccacaacccatttttaagacttcattgtgttctttaaatccaaaatggcatcttttaggttctgatcggttgtcaaactttgactaatccgttcatgagcatgcatgacggtcgtatgatctttaccgccaaactcttggccaattttaggtaatgagctgtcggtcatttcgcgagcaaggtacattgcgatttggcgcggcaacacaatctctttgacccgcttgcgacctttaagatcagcaacggttaagctgtaatatttagcaaccaccgattgaatcttggcaatcgagagctgactagatttaccgttgagtttcaagcctttgagcgcgtcggccgctagactggttgtaatctcagcgttttgcatcgttgcataggcttggacccgcacgagtgcgccttctaattcccgaacgttggaatcgatttgcccagcaatataactgagcgtatcttctggaatttccagatgttccgcatcggctttatttcttaaaatcgcaattcgcgtctcaagatcaggtggcgtgatatcgactggtaacccccatttaaaccgagaaaccaagcgttcttgcagcttgggaatctcatttgggaggcgatcagaggtcaacacaatttgtttcttatcattatagagatcattaaatgtatggaagaattcttcttgcgttccttctttatcagcgaaaaattgaatatcatccactaataaaaggtcgacgttccggtattcttgtctaaatttctcttgattcttcgtttgaatcgaattgataaaatcgttggcaaaagcctcactcgtcacgtacttaacgttcgtttcgggttttgattcgagtaattggtgaccaattgcttgcatcaaatgggttttacctaaaccaacaccaccatataagaagaggggattgtataagacaccgggttcttcagaaaccaccaacgccgcagcgtgggccatttgattgcctttcccagtgacaaacgtatcaaatgtatatttactatttaaatgcgtttcacgtaaaaaggttggtgtttcagccttcgttaaaacgtgttcttcttctggttcaagcggtgttaagttgtcagattcaccaggtaacacaaaaataggggtcagctcgatttccgcaaactcataggccccttcaacgactttagtcgccaagttattttcccagtattctttgtgcaagacagaaggcacttcaattagtagttcgttagctctaaaagcaagcggcttagcggttttaatccaagcgttaaagccaaccgtggttagatcggtttggaatttttcttgcagataattccaaagttcctgaagatcaggcatgtagcgtgtcctcctcacataaaatcaccactttattgaaaaatactcaataaagaaagactaaatacattctagcattctaaaaaaaagttttccacaacaagaacaaaatccacaggataaaaataaaaagttatgcactcatccacaacgaggcggataatttttattctggggtgtggacaactgagaaatacacagcaattttagagttatccacaaaaacgaattgaaaatagacgctttcatagtgcgggttcttcagacttattcacaacgttaaaaacaggtgtggataactaataaacaccctgtgattctctggataactctggtaggtttgctggggataaaaattatgttaaaatcgactattcaggttatccacaagaaaaacaaaatttttcagatctgtggacaaccaaatttaacgaatttttttacagaaagtgttttaacttctatagaaatatgctattatattttagtgaatgtcataggtggttattgccgccagttgtttctcagataagaaaacaatagacatagtcaattaggaggtgccagattaatgactacaaagagaacatttcaaccaaagaaacgccataaagaacgtgttcatggtttcatgaaacgtatgaatactaagaacggtcgcaaggtacttgcaagacgccgtgctaagggcagaaaagtattatctgcataggccactgatgcttcagtggtttttttattatcctcaatttattaatagaaatgccggagtgaattatgagaaagtcgtaccgtgttaaaaaagaacaagatttccaaacggtttttgatgcaagtcaatcagtggccaaccgcaattttgtggtttaccgcttagataaacctggtcaaaaacattttagagtcggtctttctgtcggtaaaaaagtgggtaacgcagtgatgcgtaatcaggtgaaacgttatattcgccaaagtattacggagttgaaaccagatttgttgcaacccgttgactttttggtgatcgcaagacgtggcgctaatcaattaacgatggcagaaacaaaacaaaatttaatccatgtcttcaagctagctaagttattaaaggaagaagcagattctgcttctgaataagtgagggattgagagtgaattcaaaaaatcgcaaacgactattattagtcgctagtttattcttatttatgctaattgctgctgggtgtagtactgcacctgttagcagtgctagcactggtttctgggatcactatattatttataacttctcacgattcctgttgtggttagctgatatctttggtggtagttatggttgggccatcgttgcctttactattattatccggttgattattttgccattaacttggtggcaaagtaagacaatgatgaagcaacaagaagtggcacctgaaattcaagcccttcaaaagaaatacgcttctaaagatgttgaaacacaacaaaaattacgtgaagaaacacagaaactttacgctgaagcaggggtcaatcctgtgattggttgtttaccattattggtccaaatgccagtcttgattgccttgtatcaagccatctaccggacatctgctttgaagagtgggtcattcttatggatgcaacttggtaaagctgatccgtactttattatggcgattttggcggccgtctttacgtttgccacatcatatttaacgatgatgtcacaaccaacgaagaatgccacaacgaccgcaatgctctgggtaatgccaatcatgattttcgtgatggcgatgaacattgcgtcagccgtttcaatttactgggtagttacaaatgccttttctgttggtcaaacaatggtgattcaaaatccattcaagatccgtcgggaacgtgaagctaaagaacaagttaaacgtgatcgggaaaaagcacttgctaaagcacgtaagaaagcaacgaaaaaacgttaattttaaaattaaaagaccgaccagcattttatgctggtcggtcttttttgtgttttaataatccaactgcttcaagcggaataagaagtgctggtcatcaattggttttagatgatagagcgtgaccactttgcgcgttaatttggtgtcgatcggggctgcatcaccaaagagatgaaagtgatcgaaaaacgccgtgttagcttgttcgataagggttaaaagaccggcaccacctagatcgctgccgaggtgggcttcatctgatagttggctagccttgagatgttgaccgtactggatcaattctggtccggtcgccatgatttcgtcagggacttcacgcctatttaataatgcggctaaatctgccaatgtgttggctggtatttgttcaatggtcatgttcagcatcgccttcctagcagttatgtatctgcttacatcgctaatataacagatttaaattaaatgtctagtaggcggccgtttaaaatcgtcgcactggtcgttaaaattcgttataataggcgcaatagttgaaaagcggagggcaaggatatgacttactcagaacaatgggatttagaaaccatttttaaagggggcttagcctcaccagccttagaaaatcgactccaagcattggggcaacagattccggttgttttaaaaatgacaagtgactggcaatttgtgtttgatgaaccagcctttgaacaaatgcaggccatcacgacgcaattacaacaaattgaatccgggttgaagcaaacgggcagtttcgtcaacatgattcaatcggttgacgaacgcaaccaacaagtggcacccatgatggaccggattaatcaattgcaaaataccgcccgtcaaattgatgtcttattgacgaaaaaattggtggccttgacggttgaacaatttgaaacattagtcagccaaccagcctttgcgccgattcagttcaacctacgggaaaaacgccagcaaggcgcggacttattagatgaacaaaccgaaaaattattggaccaattggcactcgatgggttgcaaggctggagtgatcactacgatacaatcgttgcggaaacccagattccttatttagaccaaaccttatcagctgggcaggcccaaaataagtttgaatcagatccagatcctaaagtccgcgaagtggtttttaaaaattggcaacaaacctgggatcgtttctcaccaatgttggcggataccttgaatcacttagctggttttagattaacgacttaccaagctcatgggaccaccgactttatgaaaaaaccgctagaatataaccggatgaaaccagctacactggatgcgatgtggtcggtagtcagccaaaataaagcaccactggttgcttttttgaaccggaaggccgctttaatgggtaaaaagcagttagcttggcaagatacttgggcaccggtcgttgttgatgatttccagatgactaaaaaatcgtatgacgaagctgctgaatttatcattgcgcatttccgagatttcagtccgaaaatggcagccgtcgcacaaacggcatttgaaaagcggtggattgaagcggaagatcggccgggtaaacaaccgggtggctacatgaccgatttacccgagacgaatgattttagaattttcatgacctatgatggcacacccggcggcgtctcaactttggcgcatgaattagggcacggctttcatacgatgatgattaatcaattacctggctggcgccaagattacgcgatgaacgtcgccgaaacagcttcgacgttggcggaattaatcgtggtcgacgcaacggtcaatgaagcacaagatcgcgcaacgaagattaacttactcgatcaaaaaataacaaacgccatcgatatgtttatgaatattcatgcgcgctatttatttgaacatcgtttctatgaaatgcggcaacaaggactactaacgcctgacgatttgaaaggcatcatgttgagcgcccaaaaggaagcctatgcggatgcactaacggattatgatccattattctgggcggacaaacaacatttcttcttcgatgatgtgccattttataacttcccgtatacatttggatatctcttttcaatggggatttacgccaaagcgcaaagtgtgccgcactttgaagcggattatatcgcactcttacaagacacggccaatatgagtactgaagaattggcgcaaaaacacttaggcgttgatttgacgcaaccggccttttggcaagcagcggcggactcgattgcccaagatgtggcgctctttttagagctaaccgctaccgatttagattaagtgtcgcttaaaaagcgggcatgttatactgatattagataaaaataagcgtccagtgacaaactgacgcttaatgagcggaggtttaaaaatgccaacttttgaaggtaaggatattcaagccgcaattgatgcggggttagcagcgttaaaattaacgcgtgataaggtcacagttgatgtccttgaagaaggtaagaaaggttttttaggttttggtaagcaaccagcaatcgttacgttaaatccgataacggtcgctgagccaaccccagttgaaccggaacaaccaagcgttgaagacgtggcaactgaaccagcagatcagccagaaaaggccccaatgcgtcagagtcgtgaggcgacaatcgaagccttaaagcaatacattaccgacataacagcacagattggcacgccggtcacgatgaccgttacaaaagaacacaagcaagtcatcttccatttaaagacgactaaggaaggtttgctgattggcaaacacgggaagacgatcaatgcgctccaatatttagcgcaaacgtattacgatcatcacaccaagggaaaacaattgatgatgctggatgttggcgattatcggcaaagaagagcgacaattgttaaacatttagcggataaggcggccagagaagtggtcgcaactggtaaggcggtcactttagagccaatgccagcgtttgaacggaagattgttcatggctatttaacgaacaaccgtcacgtccaaactcactcagaagggcgcggtgatcgccgggtaattgtggttgaatcagcccgttctttttaagacttgtcaattgacggtcgatagaaatcgtgtataatgaaactaattaaatatcgataaagtagtgaaagtgctttgtccaccccttacgcaatgacgggaggggtggacgctaagcgctttttttatgcagctattttaggaaggaagcttttataatgccaacgacagtcacagaatttgatacgattacggcgatctcaacaccacctggtgagggggcaatttcaattgtgcgtctttcaggagatgacagtttagccatcattaaacgggtttatcgcggcaaggatctcgataaagtggcaagccatacgattaattatggccatattattgaccctaaaacggatgtggtggtcgacgaagtcatggtttctgtcatgcgagcgcctaaaacatttacgcgcgaagatgtgattgaaattaattgtcatggtgggattgtggcgactaaccgaatcttgcaactattgatgagttacggtgcacgaatggccgaaccaggtgaattcacgaagcgggcctttttaaacgggcggattgatttaacccaagctgaatctgtgatggatcttatccgggctaaaactgaccgggcaatgcaagttgctgttgatcaattggatgggagcttaacgcatctcattaagaatttacgccaagaaatcttagaagtattggcgcaagtcgaagttaacattgactatcccgaatacgatacggatgaaatgacgacccggattttacttgaaaaagctgaacttgttaaagggcgaattggtgaattactccaaacagcgcaacaaggcaaagtcttgcgtgaagggttggcaacggccatcgttgggcgaccaaacgtcggtaaatcaagtttgttaaaccatcttttacatgaagataaagccattgtgacggatgttgctggaacgacccgtgatgttttggaagaatacgttaacgtccgcggcgtaccattgaagctggttgatacggcggggattcatgataccgaagataaggttgaaaagattggggtcgaaagaagtcgcgcagcaattaccaaagccgacttgattttattggtcctaaaccaaagcgaacctttaacgattgaagatcgcgaactaatcacagcgacaactgataagaaacggatcattattttaaataagactgacttacctaatcaattggacttagatgaacttcaaacattagttcgtgcggatgaagtgattcaaacgtcaattttaacgagtgaaggggtgactgatttggaagcccaaatcgccaaactcttcttcggtgggattgaaaatagccaaagtacggtgatgattaccaacgcccgtcaaattggcttattaaaccaagcacaacaatcattagatgaagttattagcgggattgcagctggcatgccagttgacctcgtccaaatcgatatgaccaactgttgggacaagctcggtgagattaccggggattcagcaccagatgaattgattacggaactctttagccaattctgtttaggtaaataggtcttgaaccatattaaaggagaacaaaacatgcgagaatatgacgtagcgcactacgacgtgattgttgttggtgccggccatgcgggttccgaagcggcattagctgctgcacgaatgggccgcgaaacattattattaacgattaacttagatatggtggcttttatgccatgtaacccatcattgggtggcccggcaaaaggcatcgtggtccgtgaaattgacgccttgggtggtcaaatgggccgcaatatcgataagacttacatccaaatgcggatgctaaatacaggtaaaggcccagctgtccgcgcattacgcgcccaagctgataagcatgcctatcaccggacaatgaaacggacaatcgaaacgacggagcacttaacactccgtcaaggcattgctgaatcattgatcgttgaagacggtgtctgcaaagggattgtgactaacacaggtgcccgttacagtgctgacagtgtgattttaacagccggaacagcctcacgaggcaagattatcattggtgaattaacgtattcatcaggtcctaataattcaattccttctattaaactttcagagagtcttgaagataacggttttgtgttgacgcgttttaaaacggggacaccaccacgagtggacggcacaacaatcgatttttcaaagacggaagaacaaccaggggataaggaaccgaaccactttagtttcgaaacgcctgatagtgcttatttgaaagaccaactttcttgttggatgacgtacacgaatgatacgacgcatcaagtgattcgcgataatctcgaccgcgccccaatgtttaccggtgtgattgaaggtgtcggcccacgttattgcccatcaattgaagataaaattgtccgcttcgcggataagcctcgccaccaaattttcttggaaccagaaggccgcgaaacagaagaatactacgttggtgatttttcaacatcaatgccagaagaaatccaacacaaaatgattcattctatcgaagggttagaaaatgcccaaatgatgcgccctggttatgcgattgaatatgatgtcgttgaaccatggcaattaaaaccaacccttgaaactaaagtggttgaaaatctttatacagctggccaaatgaacggcacttcaggttatgaagaagctgctggtcaaggtttgatggccgggattaacgccgccctcaaacaaacgggccgcgacccattcatcttagatcgaagtgaagcttacatcggggtcttaatcgatgacttggtcacgaaggggactaaggaaccttaccgtctattaacctcacgtgcggaatatcgtttaatgcttcgtcacgataatgctgatttacgcttaacggaaaagggtcatgaattaggtttaatcaatgatgaccgttttgacagttatgaagtgaaaaaagcagcggttgaagctgaattagcacgtttagaaaagattcgcttaaaaccaacaccagaaatccaagcctttttagctgctaaaggtgaagcgccacttaaagatggtgttttagccagtgacttcttaaaacgaccagaagtgaagtatgccgatttaattcaattcattccagcggttgaaggaatcgataaccgtgttgtggaacaagttgaaatccaagtcaaatatgcaggttatattgataaggaaaaggctaagattgcgaagttaaaacggatggaagctaagaagattccagccaatatcgattacgacgcaattgaaggtcttgcaacagaaggtcgtcaaaaattacaaaaaattcaacccgaaacacttgcacaagcaagtcggattggtggggtgaacccagccgatatcgggattctaagcgtctatattcaacaaggtaagattgctaaggtcaaatagcctggttgataactagtcattagatatgttagagttaagcatatattgtcaatggtagaaagccagccgtttcacatgaaacggttggctttttagagtcatgaaagaaaagtgagggaatcaagtgataactgttagtgaaatgagcttaacgctttctgggcgtaagttatatgaagatgttaatttgaagtttacacctggaaattgttatggcgtgatcggtgccaatggtgcaggtaagtcaacttttctaaaattattagaaggtaaattacaaccatcatcaggccacatctcaatgggccctaatgaacggatgtcgagtttgaatcaagatcactacgcttttgaagaatttgaagtgttagagaccgtgatccaaggtcataagaagttatatgaagtgatgcaagctaaggatgccctatacgctaaagctgaattcactgaagaagatgggatgaaggctgctgatctagaagctgaattcgctgaaatgaatggttgggatgctgaatcagaagctgctcaattactccaagctttaggtatcgatgaatctttacaccatgtgaagatgagtgaattgatggaagggcaaaagattaaggttttacttggtcaagcgctctttggcaaacctgatatcctattattggacgaaccaactaatggtttggacagtgcctcagttgaatggttagaaaacttcttggctgacttcccgaatatcgttattgttgtttcccatgaccgttacttcttaaaccaagtatgtacaatgatgtgtgatgtggactttggtcgcatcaagacatttgttggtaattacgacttctggttagaatcaagtaagttggcagctaagttacaatcaaacgttaatgctaaaaaagaagaacaaatcaaagaattacaagactttatcgcacgtttcagtgctaatgcttcaaaatcaaaacaagctacttctcgtaagaagcaattagagaagattacattagaagacatccaaccttcttcacgtcaatacccattcattaagttcgatttcgaacgcgaattgggaaatgaccttttacgggttgagaacgtctcaaaaacaatcgatggtgttaaagtgttagataacatcagcttctcagttaagccagacgaaaaagcagcaatcgtttcacgaaatgacgttgcgacagctgtcttaatgcaaatcttagctggtgaagtagaaccagatagtggtacagtgacatggggtgtgacgagtcaacaatcatacttaccaagagatacgaactcagcctttaatgatgatcaactcattatcttagactggttacgtcaatttgccgctaagggtgaagacgacaataccttcttacgtggtttcttagggaaaatgttattctctggggatgaagtaacgaaggaaattaatgttctctctggtggggaaaaggttcgttgtatcctatctaagatcatgcttcaaaaatcaaataccttactattagatgatccaactaaccatttggatttggaatcaattacatcattgaatgatgccttgatcgatttcaagggtgctttgatctttacatctcatgatcaccaatttattcaaacaattgcagatcacatcattgaagtttcagctaacggtttagttgatcgtgccgaaacaaactatgatgaattcttagcacatccagaattacaaaaacaagttgctaaactatacgcttaataacaagagaagacccgcagacacggatttgtgtcgcgggtcttctttttttgaatctttttcagaaagtccttgtatctgctattgtaagttggtatactagtaaagttgtcgcaagcgagtagctcagtaatgagtgggtacttgggtgatgattaaacgaaagaaggcaaaatgatgaaacgcttatggataacgagttatgttaatcaaaccaattatcgcaaggttaagtggggcatgattgaactcaccgttgtgttagcagctgcacttatcgttagcacgtactttgcaattcgggtttaccaagacttcaatagtttcacaacgattacgatgaattagtaatcactataaagactgattgcgctggccgaatcactaatggttatcaatcatagtgtcattttaaaaacgacgcctggcagtaattggtttgtgggaaaatcaattgctgatcaggcaaactaacttactttgtttataatcttaatcgcaagattaagctataaaaaaccgcggtgcttgcatcgcatctatataaattctagggaggaatttcatatgaaatttacgaaattaacaagtgctgcattagccggcgcaacagtattaagcattttggctccagcgacaacaaccttcgctgcaactcatgaaggtggcgtcatcgataatggtgggacaccattagcacaaactgacaaaacagaagttggtatctcattcggtgataacatcgataacgggaatactggtttcttacgccttcaaaaagtgcctaaggttttagattttggtaaccacgcaacttttgacaaagcattcacaacattcacagccgatggtaaaaactacgccaatgacaagaataaccaacatgcgtcatatgacaactcagttgctaataaaacacctcttttaaatgcaggtagtgatacagcgcttaaagatgttgccaatgatgcttgggtcacagttgttgataaacaagtgacacgtcaacatgcagacggcatggatgctgccacaactcaaaaagctggggattgggatttaaaagtatcaactgctgaaccattgaaaacgacaagtggtcaagaaattgatggtgctaacctcttattcaaacatactaaatatgcattgacatctggtgtttatgaactaacaaactcagatcaagataagacttttgcgaaagatcttgctgattataaagcaagtatcgcaacaccaccggctactcctaaagccgacggtgatgatggcgatggtgatggtggcgatccagcgccagcaccatcagctggggatgttgcaatcaatgaaactgctaaagatgcaatcacagatacattctcattatcactagcagcaccaacaagtaagttggatactgcagccggtacagtagttggtaaagcagatactgatacaggtacaggtgctaacgtcttcgcatgggcaccagaagatatccaattagttatgccaacagatgctgcagttgcaaatgcaatctacaagacatcattaatatggacattggaaactggtaaataagtatttaggtgcaacgagctaatattagctcgttacacatacatagatgaattaaattcatcgatagtttaacttgggaggaagtggcgacatggattatttgagccagtggtatattgaataccgatcagtgtcatctaacttgaatgcgatttgccataaacacgatattagtttagaacaatttttatacttagaaagacttgttatggaaggtacccaatcaccgagtgagttggcaatggtatttaaaatatcgagtccgattgtgacccgtaagttaaatgtcttgcaagacaaaaaaatgattgaaaagctacgtggcgaacgccaggaccaacgcttagtcaacattacaattaccgatgaaggtcgcaagatctacaagaaggttaatcgcgatattaccgaatgggaagagcaccgtcaaagcacggcggttccaactttgggtcgtagttttcttgaacaacaataagaatagactggaaataggcgactgcgaaatagcggtcgcttatttttttggactaatccagttgaccgttacaaatgaacgtgttaagttaatgctattcaataaaatcattgattatcgggagggatggatagtggaagaacagatattacaatatcgagatgccgtttatgagcaagtcgtcaaggtagggaaatcattagggaatgtgacgcgcttgcggatactagatttattggtgcagggtcccaaaacggttgaaaatttagccaatacgattgggttaagcgttgcgacaacgtcacgcaatttacagattttgaagaaggcgcgcttggttgaaattgaacgacataaaaattttgtaacctaccgcttaacgtcagatcagattaagcagcttatatcgttattagtcacggtcgcagaacagtcacagcctgaattggcagccattcagacaacgttcaagcaacaaactggttcaccacaggcgttaacgatttcggcgttaaaagcgaaattaaccgctgaatcaacgtacttagttgatcttagacccaatgatgagtatgagacgcaacacttgccgggagcgcataatatcccatatgatgagttaccacaacatttagccgaattaccgcaagataaggaaattgttgtctactgtcgcggtcggctatgtgcttatgccaatgtcgctagtcaggcgttgcatgatgcgggtttcaaagtggcgacctttaatcaatcggtgtgggaatggaatcagttgatgagttcctaaagttgacttacaaaaagtaagatgatatattatgagtatcaattcaacggaagcgttgattaacttttgaagaggaaggcgattgtgatgacagcacaaattttaaatgaagccaattttaacgatgagattaaagaaggggtcacactagtcgatttttgggcaacgtggtgtccaccatgtaagatgcaaggaccaattgttgaacagctagcagatgattatgcaggaaaggctaaaattgccaaagttgatgttgatcaaaatcaaaatttggcagcgcaatttagcattcaagccattccaaccttattaatcatgaaagacggtcaattacaagaacaactagttgggttgcaacgtaaagaagcattagcgacaaaactagatgccacattagcataaataaacatttaaaaaggatgacggcgaaggtactttgctgtcatccttttttatttagtagtaagttctaaaattaattaatcacccaaattgcaagaacaaattagccacacgataaatcctattaaatcagtattttcattaatattcatattttatggacttaacttaaccggcggaagcagcggagaaaagctctttgggtgtttgatagccagtttgccggcgcggtaaattgtttagctttgactcaactgcttggatatcatgaggacccaaaatatccatggatagacccttgggtacatcgcggcggatcattcgattatgcgcttcgttagtcccacgctcagaggaacgatatggatgggcataataaaggttagcgacaccggtaagtacagcgccaacttccgagaactcagcgccattatcggcagtaactgacttcatgattgatccgtattcttgacagatcttggccagctcatagttgactgaatcggcatcacgaccatcgatcaaacgtagaatttggcagcgggattgacgctcgatcagcgttaagatcacactctcttgaccgttgcgcttgcccaccacggtgtccaattcgaaatggccgaactcttggcgctggtcgatacttttaggccgttcatcaatactccgtccggccagacgcttgtgcttgatcgagtgatgatatttagcacggtggcgcgttttttcgagtagatcaagattacggacttcaagtaactgggcatcaatatagtggtatagcgtcttggtcgagaccatctcctcaggttgatataagccttcaagtttggcccgtcctactgctgcatcaggcgaccaaccatcttgacgcaaatgagtcgtaaaatagtcgataaaatcagcgacaccgacgaatttcaaaggtcgatgacagtgggctcgattagcttcgtacttagcttgtgctgtttctggtgagtatacagcgtaatattggcgttgaccattcactttttttacttggtcgatctcgccgcggcacaattcattattgattgtttgatgacaaacattaagcgctctggcaattgcacgattggaatagccttggctgtgcagcgtagcaattctgcctcgttcaaacgaagttaggtgctgacctttttttctgactgtggtattctgttcttgcatcaagacaataacctctttcattgtttgtgtaggaacatcaatgataacagagatttgtcttggtgttttttattttatcaattagctaaaagtatttggctaacttgattataaaacgcgcgtaaaaaaagcattattgagtactttaatagattccatatcaatacccgaaaacgggttcaaaccgtaactctggatctcaatagttactataaagatatcgttaaggaaatgtttccaaacgcagaaattgtcgttgatcgattccacattatcgccatgatgacgcgggcattcaaccagactagagttcagacaatgaaaaaatatgacaagaaatctatcgaatatcgactgcttaagttctcatggaaactatatttgaagcactttgatgaactagaagtcagccaaactttctatgatcgtcatttacgacagcagttaactcaacaagggcgagtacaaatggagcttgacactgatgacactatttcgagcacatacgatgcgctgcaaggtatcatgtcctgtcttaaaaatcatgacaaagatggcattgtctactatctctacaaaaatgaaaacctaagttttcaaatgaaggaaacactaaaaacgtttaaaagtaatctggaaattgtcttgaatgccagtgaatctaagtattctaacggtccaattgaaggtattaatcggatgattaagcagattcagcggactgcgtttggatttagaaatttccatcatttaatctcgcggattaagcttcaacaaacgagaacaaaaccaaatacaaaaacagaactagaagccgcttagcttctagttctgtaaaactatctatcaacaggatttgacagagagccctaaaaacagtgccggctcaatgattagcctaatttagctttaatattttttaacgaaacttcactcgtatccgcaaagcgcacatccgcttccatcaattgattaccaatcccgattgaaagttcacccgcagcattaattgacttaatgccagcacctgaatcttctagaccggcaacaacttctggtgctaagtccatcacaccggccgccaaactgaagatttctggatctggttttccggcatgcaatttggctggatcaaccacgccttcaaagtagtcggtaattttcaactgcttcaaaattgcaggggcgttctttgaggctgaagcgacggacattttatagccgctagcttttaattcgtctaagaaggctttcatccctggtagcacgtcatctggcgttaatgattcaaccagcttcaaatacttggtgttcttttcggtagccaaagccaccttttcatcctcggtgtagtcattttcatggccacccgccttcaaaatcatttccagtgaatccatgcggctgacacccttcaaggcttccgctagttctggtgtccattctgaatgaacttcatccgccgtttggtgccatgccttagcgtgcaatcgggcactatcagcaatgacgccgtccaaatcaaatgcaaatcccttaatatcttcaaacttcatggttatccctccgaatagtaataagttgatgtgtaagttttagtttgattagcgggtaaaacaatgtcgccaaatccgtcgtggtgaatcgcatctgggaccgtttgtaattccacagccagtccgttatctggatgagcagcaagccaatccgcatctttgccaatgcaatcgggattgacgttaaaaataatgacgccattgcgatcactgcccatttctaattgatgctgctttgcgctatcaactagtaacaagcttggtgttatgcctagcgatgtatccggctttttaaaggcatcatcaaactgttcgttgccgccaagtttttcacattgatcgcccagcttaacaaggtttgtaaaatcaaacggggtattttcaacgacctgtatttcacccgttggaatcttttcttcatttaccacgatatgcctatccgcaactatcttcaagaattcatccttgattggcgcgtccggtccatccaaattaaagtaaacatgcgtcatcggattaaatagggtttccacgttgctgcgtccctcatattgtacggaaacatggttatcctcatctaaagaataggtgatggccatttccaacgtcccaggaaaaattgctttctgttgcatggtatatcgaattttggcagattggtcgtctagaataatctcgccatgccaattgagccgatcaatgcccgtgttaccactgtgtagcacatttttattttcgtttggcttcaaattgaccctgaatccagcgacgttaaacgtatggccgctcaaccgtcctgccacccgaccaatggtgtttcctaaatgaaagggattcgtttcatattcgtgcacgttatcaaaatttaaaatgatattcttctctggtgtcacaaagtagccagtccaggttgctccgtaactgattgtgcggaggctcacaccatttttatttgtaatcgtaaattctttgactaactcaccattttctaaatggccaaaatctttaacagtcgattccaccagtctcacccactttcttttaataaaaaaggcgaagagcagtttcccactcttgccctttttttagtcctatttaagctcttccttcttaccatcgaggtcaaccgtaattgggtcgccatcgagcaagtcaagcttcgtaccagactgatcaaccgttacctcaatcaaacgaccgcggaacaattgacggaactggtatgactgccatttcttaggtaggaatggtgcatagtgtaactcaccgttgcgaactcgcatgccagcgaatccttgaacaatggctaaccagccaccggtcatagctgtgatgtgcaaaccatcgaccgtgtcattattgtagttatccaaatcgagacgagctgtccgttcatacaattcggttgccttttcttcataatgaagatcagctgccaaaatggcatggattgaagctgacaaacttgattcatgaaccgttaatggctcatagaaatcaaagttggctttcttctgttcaggtgtaaagtcatcaataaagtcccagattccttgaagaacatcggcttgtttgatgtatggtgaacgaagaattttgtcccatgaccagttttggttaagtggcaattgatccttaggaagtgagctgactggcttgatatccttgtctaggaagccatcgtgttgaacgaaaattcctaacttcttgtcttcaggaaggtacattctgtccacaatgtcttgccactgtttcttttcagcgtcagtgacgtttaagtctttagcaacttctggtgcaacctctggcaaaatttcaagcgtatatttcaacgtccattgtgccaaaatgttggtataccagttgttatcaacgttattttcgtactcatcagggccagtaacaccatgaatcatgtacttgccattccgttctgagaagtgaacccggtcagcccagaaacgtgaaatctccgttaagaccttggcgccttcatgctgaacgtatgacttgtcaccagtgtagtttgtgtagttgtaaattgcgtaggcaatgtcgccgttacggtgaatttcctcaaatgtaatttcccattcgttatgagattcaatcccatcaaacgtaaccattgggtataaagcacccttaaggccctgttccttagcattatggaaggcaccgtcaatttgttggtaacgatacttcaacaagtttttggtaacatttggatccgtaacaccaaggtaaacgggaaccgcaaaggcctctgtatcccagtatgtggcaccaccgtatttttcaccggtaaagcctttaggtccgatgttcaaacgagaatcctcgccatagtacgttgagaagagctggaataggttaaaacgaattccttgttgcgcttcatcgtcgccagcaattttaacatcagaaacgttccagcgatttgcccaaacagctttgtgggcgttgaataaatcactgtatgatgttgcagaaatttctttatttaattgggttaaacgagcctcaagatcagcttgtttagggaagtcacgtgatgacacaacaactgtgcgcttctggataattgtttgctcaccagcagccagtgttccgctaaaatggttcgtcgctgagacatcggtttggtctgcagactcactgttccagtccgtgacaactgttgataaagcaccaaccgtaaattgtggtgttccaaagtcgtttggctttgtttccgcaataacttcggcttcattatcagtcttagcaactttcaaaacgtcccagaacttttcatcgtaattggcgtcttcattttgtacatcagcatcaacggatgaactgaattcaaccttagcttctttagaacccacattcttcaagataatcccttgaacaacgagttccttagttgcagcactgacaaatcgttcaaatgaaatctgaacctttgcgccacccttttcaacagtgaaagcccgttcgagaacggcctgttgcatatctaaatcaaggttgaagtcactcaccttgtccttagccaaatcaacaacttcaccgttgattttaatgccaaccttgataaagttgattgcattaatcactttgccaaagtacttaggatagccgtttttccaccagccaacctttgtcttatctggaaaccaaacgccaccaatgtagattccgggaagcgtgtcgccactgtaaccttcctcaaagaatccacgcatgccgaggttaccatttgcaagactggtcattgattcttgaagacgtttatcgtctggattaagtttagtggtcacaatgtgccacggtgatacgtcaaatgttcgtttcatcattcagactcctttaatttttatgcgaatacttctttaatactgcttactgagaaggcaccgactaacatcaagataccggctaagagaaccatccctggcattgatgagctcatcaatgggaacaaagcgaaactcaatactgaagcaacgatttgtggtaaacagatacttccgttgaatagaccaaggtacgagcccatgttggcacctgaaagtgcgttggtcaaaatggtgaatgggaacatcatcattgcggcccatgaaataccaatcaagcagaatgagaggatgagaacccattgattatgaacaacgaaaattgaggcaaacccaacggcacctaatactaaactagttgcgtacattggcttgtgcttgtcatttggcatcttagcaagaactaatgaccaaacaacggcagctaaagcgtaaattgcggatagaacaccgaaccagttggcaccggcttgatagccagcacttgcaggatctgttgcgcgccaaacgttcttggcgacggcacctgcaccataagtccaaaggtattggaaggccatccagcagaagaattgaacaagagttaacgtccagaatactttaggagcacgtttcaaaagtgtaaataaaccaactttttcttgaacatctgcttcagtaataccgtgataggcgttatattctgcgggtgtatattctttaactctcaaaatagtgaaggcactacagataactaagataacggcacctgtatagaatgagaaaataactgagttcggaatgacaccctttggcgcaatgttagcaacacccaaaccagttaagaggtatgggaaaattgcagctagcactgaaccactatttgataagaaactttggattgagtaagcaaatcctttttgctcatcattcaccatgtccccgaccatcatcttgaatggttgcatggcaacgttagacgataaatccatgaagagaattgtgatggcaccgaaccaaagtgctgcaagtgatccataaccaaatcctaagctaccagagtttggtagtaagaacataacgatgacggcgactaacgatcccatcaaaaggtaaggtaatcgacgaccaattttaggcatccacgttttatctgaataatagccaactaatggttgaaccactaaacctgctagtggaggaagaataaagaagaaacctaatttggttggatcagctcccaaagtttggaagatccgccccatttgtgaagattgtaaagagaaagccatttgaacaccgaagaatccgaaactaatcatccaaattgtcgcgatagacaattttggcattggcttggtttttggcgttgtagccgtgttgccttgtgctgaatcattttccatgatttgtcactccctgtttatttgggttatgtgaacccatttttcttaacaaaatgaattataaaccgctttgataatttgtgcaaccgtttgcacaaaaataaaataaaaaagagttgttgctcacaactcgtactgcacaattaatttttgaacatttcgatcggtaaataacaattctaccgcgcgactgcccagcatttccggccgcatatcaaccatgcggacatcttggtcaatcaacgctagtagctcactcttattgaaactcatcatcggaattttctttgtgtgtcgaattttgctccaaacccgattaaaccgcagcaagccaacatcgtcggttgcaattaccgcatcgacctcttggtgctgattcaaaaatacctcgactgctgtttcagaaacgcgttttggtaatctaaatactagcggttctaattggacttccgccatcgccttttcgtagcccattcggcgattttgctcgtattgccactcatattcggattcaacaaatagtgggtttcgaaccccgccattttgaagaattgccattgtggcatctcgcccagcctgaacattgtcgttatcgacgtatcgatccggcaaatctccaactggctgaccaataaccacaaagtccaaattttcgcgacgcaaatagtcaacgaccggatcattctcatccgtatatagtagaacgaaccgtttgacctttgcctgttgaaccatggccgtcacgttagcaaggacctcttcaactcggctcccaatcgcaattgataaaacatagtgtcgggcgactagcgactgattgatgcctcggagcatatcaatatagaacggattctccggtgaggaactttccaccgttggaaaaataactccgacgacgtttgcttcaccgcgagtcaggttcttagcggtataatttggcagataatcaagatccttggcgagtttttggatttgttcacgcgttttaaggctaattcttgaattattatttagcgcacgtgaggcggttgagactgagacaccagcccgacgcgcaatatcttttattgtaatcatgagcgtttcctttttcatttattggcaagcttctccatctgaagtttaccacgaaatccctccatttaccgacaaattcaggtagaccatcgattttaatctcaagtaaaacttcaactttgaccaaagtcattctttcatcgcttacacaattacttaaggccctatacctttataaaatcctttcattgtgaaaaaattattttcaaaagatttcccgtagttactaatgtaagacagttttcacgaaattgtgtcgatttaaagtaaatgaaagcatttacaaaaaaaccagatgagtttatagtgaaaatgtaaaccccaaattgcaagaacaaattagccacacgataaatcctattaaatcagtattttcattaatattcatattttatgggcttaacttaaccggcggaagcagcggagaaaagctctttgggtgtttgatagccagtttgccggcgcggtaaattgtttagctttgactcaactgcttggatatcatgaggacccaaaatatccatggatagacccttgggtacatcgcggcggatcattcgattatgcgcttcgttagtcccacgctcagaggaacgatatggatgggcataataaaggttagcgacaccggtaagtacagcgccaacttccgagaactcagcgccattatcggcagtaactgacttcatgattgatccgtattcttgacagatcttggccagctcatagttgactgaatcggcatcacgaccatcgatcaaacgtagaatttggcagcgggattgacgctcgatcagcgttaagatcacactctcttgaccgttgcgcttgcccaccacggtgtccaattcgaaatggccgaactcttggcgctggtcgatacttttaggccgttcatcaatactccgtccggccagacgcttgtgcttgatcgagtgatgatatttagcacggtggcgcgttttttcgagtagatcaagattacggacttcaagtaactgggcatcaatatagtggtatagcgtcttggtcgagaccatctcctcaggttgatataagccttcaagtttggcccgtcctactgctgcatcaggcgaccaaccatcttgacgcaaatgagtcgtaaaatagtcgataaaatcagcgacaccgacgaatttcaaaggtcgatgacagtgggctcgattagcttcgtacttagcttgtgctgtttctggtgagtatacagcgtaatattggcgttgaccattcactttttttacttggtcgatctcgccgcggcacaattcattattgattgtttgatgacaaacattaagcgctctggcaattgcacgattggaatagccttggctgtgcagcgtagcaattctgcctcgttcaaacgaagttaggtgctgacctttttttctgactgtggtattctgttcttgcatcaagacaataacctctttcattgtttgtgtaggaacatcaatgataacagagatttgtcttggtgttttttattttatcaattagctaaaagtatttggctaacttgattataaaacgcgcgaaattaattcgagcagaaaaaacttaaagcagtctcttttaatgctagtagctttttggggaaggtattggatcagcaataatcctacctaataggactattgctaactaatttataagaatatatattttattataaaaatgtttattataaatataacagagtataatatatataaactaaggagcttagttaagcattttagccaaaaattaatataacggggataattactatgagttcaaataataatatagttaataatatcggagaacaaattaaacaattaaggcaaagtaaaaaaataagtgtagaaaaattatcagaattatcaggactaagttcactaactataacaaagatagagaatggaaaatcgaatccaacaataaatactttatggaagttaacaaaatgtctagaagccccactaatgtctctatttaaaaatagaggaagtaatgtcgttttttcaactgaaaatcatggttattttttagaagatgaaaatcacaagtgggaagtcgaaccaattgtaggtcaatttgatttcgaggtatataaagttcggctaaaagctaatagtaagtattatctagatagccagacttctaatactttagaggtgataactgtactatcagggacattaaatcttagagttgagcatgatagttatattgttcatgaacacaatacaatttacttcataaataataattcgcatgagtatattaatgatactaatgaagatattttgatgaacatagttgtaaaatatgagaacctataatgtaatatgcaattatatactataatatataattgcatattttggagggttcatatgagagagagagtacaagagaagagtgtagaggtaactgtattacttctaggaattatatttgtcgcaacaaatttaagagcaccattaactgcagttggccctttaacaggtttaattaaggacaatattggtatttctggaactattgcgggatttttaacgacaattccgttattggcttttgctattttatcaccagtggcacccaaaatagctgaaaaattgagtctagaatatactattggttattctacaatcgtattagttatagggttatttattagatcaattccccaaacaagcactttattatttggaactattttagtaggtagtgcaattgccatgtgtaacgtattaattccaagtttaataaaaagagaatttaatcatcgcttaggcctaattactggtatttattcaattagtatgaatttatgtggggcaattgcatctggagttagttttccattagctaataatctaaatctaggttggaataattcacttaggatttggcttattttggctttaattgcttgtatcgcatggattccacaattgaaaagacatgataaaccagataagatagaggaattacctatagagaatagtatttggcattcaaaaactgcgtggcaagttactatatttatgggcctacagtcactagtattctacgtgttagtcgcgtggttacctgaaatgcttattcaaaagggattcactgcagaacaagctggttatttattgtcaatgatgcaattatttttattaccatttacatttataattccaattattgctgggagggtcaaaagacagagtaaaattgccataaacacatcaatcctaatgtgtttatgaattagtgggctttttataaataatactattattataggaattgcttttattggaatcagtggtggctgtgcatttggactatcaatgatgttttttaacctaaaaaaaagaaatgcaagagaaggggcagaactatcaggcatggctcaatcaattggttacttgttagctgcaattggcccaactctctttggctttatgcatgatatgactcataattggaatgtatcattaattattttaattgtgactgctattttattagggggatttggattctttgctggtgaagataaatatataaattaaaattatgacagatgtttttaccaaataaatagaaacgttagtatgggtaacaaataccccaaaagttaaagtaaatagttagttgtcttttctaggtggcacattgtcgatattttatcggcgatgtgccgcctagtttcatttttttaggaaaaaataaaccacaccttttaggtgcgggagttagaattagcttcagcattaaaaatccctttcgctatagagaatggctaccaaccaaatctaaaagcgaaagggatttttatcatgtctcaagtaaaagacgatagtagtttagcagcacataccagatggcagtgtaagtatcacatagtgtttatcacagacatatttttaggaattgattcttttgtttagtgtaagttattctgaacgaattaaaatcgaaattttttgtgagctagaactgtccaatacttaaatagaataggttaaagtacattagtgctcaaaatatgacgactatgttactcagaattaaccgaactttgattgaagcgcttaaccgaggcgatattaccagattatgttgactaatttattaaaaaatttagatcaaatttgcaatctatctattttaaataatccgtcatgactgctttaaagaagtcgatgtgtttgaggtacatttcttcgtcaacgtattcgtcgatcatatgactggtatcattgccggggccgacaactgccactggtaagttggggttattcttagcaaagtgggcggcatcagtaccaccagcaacgtgcatcagtggataagcttgggataacttttgtgcgccgattttttgaacactttgaatgaatggtgcctgtggattacttttaaccggtggttggttattaatgacagttaatgctaaattcatgtctgtttgttggttaagttcagcaataatggcattgagatcggcaatgacttggtcgccagttaatgcgggggtcgtgcgaacgcggcaagtgagttctgcgtgaccggggaccgaattaatttgttcaccaccattgattaaggttgtgacgggaacaatatcgccgaggacatcatcgatgggatgcttttgatcgaagtattgtttttatcgattgtagtaggtgagcaaatggtcaattgcgttaataccgagttcgggcattgaactgtgggctgttttaccagtcgccgtcactttaaaatcaagggaaccgttgtgggcgaaaatcagaaaatgttgttcattggtttgattagctctgagtagtttttggacgatttctgtgggaaatttgtcgctactgtttgccaaggcttgtttatcaacgccagatggttcggcaactaataaggctgtcaaattatcggcataaccttgggttgttaaagtttgggcaccagtttcgttcttttcttcatcgactgttgcaaggagtttgatttgaccatttaatgggacattttcatcgtgtaattcgatcattgcaatcacaagagcggccagtccagatttcatgtcagtagcaccccgaccgaagagtttaccatcgcgagcggttagggtgaagggatcactcgtccatttgctgcgatcgccgatgctgacgacgtccatatgaccagtcacgccgaggactttgtcggttgcttcacctagataggccactaagttttcgcggcctggtttagaagccactttttcagtctggataccgtgttgtgtgaatagatcggctaagtagtcggcaatcacaccttccgcttggtctgttgtatcaattgagaccagtttttctaaaattgcgattttttcagttttttccatcatcaaaagacctccagataagattcaatatgcattatagggcccgtatttagggaaagcaacggacataaattaagaatttctgcaaataaagtgcatattgaaaaagccgtcacagttaatgtgacggctttttgtttgtctgatctgtgagggcttctttaaaaacctgaccagcactcgagaagacttggccttttttccagataatgttcgtattgacggttagtggcggattaaacggaacgaattttaagccgttgtccttagtattgataatgccgtcgatgcacaatgcggcgctgttactggttttgaccaataatgaggcgttatataaaagcgtgtaggtcccgataatatcaagttgatcaaggttagcgccaaaccaattactaatttgttgatgaacgagtgattgtcccgaaattaataagggatattgcgccaaggttgctgcatcaacggtcgagtgcgccgcaattggatggtcgtcggcaactagtacgccccaatgatctgatacgggtaagcggacgaattcatagcgctgcttatcgacaggatcaataacgagaccaaaatcgagcaaaccttgatcaatccgttctttgacctcatcggcagtgccgctgaataattgcagagtgatatcagggtagcgttgtcgtaaatcattgataatcatcgcgattagttgaaaggcctgcgtttcaccggcgccaatgctgatggtcccactgacgacctgattatgcgttaagttatttgtcgttgtatcaactaaagataagatttcgcgtccgcgtttttgcaggtaaatgccatcggttgttaatgtgatttcgcgattgccacgggtgaagagttgaacgcctaattcaacctccaagtccttaagttgtttagagagcgtgggctgtgataagtggaggacctcagcagccttactgattgttttctcctgggcaacggttaaaaagtaatttaaaacacgtaaatccataatacttctcctattgataaaagttatagctagctattcgatatgagtattagtcattgttagtttagcgaagtatactgaaaacagcaagtaaagaagcgcgctaaaaggaggtaatcaaggtggactactcattgcgaacgagaattgcgaatcaaccgatttaccgtgattcggagttgtttaaagaaattcatttggtcaaaggcaataatgagcgattagtgatggaaatgaatacaggctatcacgatgcagccgaagtacgggcgtatttaaagtgtattacggatcaagaaatagatgaaccagtgacagtgtcattacccttttatacggactacgctaaacacattacctttggtaaagagatttttattaataataatgttctattcgttgatttaggtgggattacgattgatgatcacgtgttgattgggccgcgcgcctcattaattaccgtgaatcatttggaaaatccagccgatcggcgtgggttattcgttaaaccagttcatatcaaacagaacgcatggattggcgcgggggcaacaattctccccggtgtgacagtcggcgaaaatgcgattgtggctgccaacgcaactgtcaccaaagatgtaccagctaatatgattgtcgccggcacaccggcaaaagtcattcgtcaaattaaagcagaaaaggagttttaacatgtcaattcaaaataaagtcgttatcattacaggtgcctcatcaggtatcggagcagcaactgccaaattattagcaagcaaaggggctaaggttgttttggccgctcgtcgcaaggatcggctccaagccttagtggcagaaatcggggaaaatgcaatttaccaagccactgatgtcactaatcgagaccagatggcaagcttagtccaattagcactcgatcggttcggtcgcgtagatgtcttatataacaatgctggcgtcatgccccaaggaaatctgagcgaacgcgattacgatcaatggcaaaagatgctcgatatcaatatcatgggtgttttaaacggggtcggtgcggttttaccaacgatgcaagcccaacaagatgggttgattatctcaactgattcggttgccggacatgtcgtttatccagcttctgccgtttataacgggacaaaatatgctgtacgcgccattatggaagggttacgagaagaaaaagataacggcatccgctcaacgattgtctcaccaggtgctgttaaaacagaattggtcaatacaattggcaacaccgctgttttcgaaggcgttaagcaattaatggatgccccagaagaatcagcgttggccctcaatccagaagacattgctaatgcagtcttatatgcgattgaccaaccaaaacatgtggtagtcagtgaagtcttgattcgcccagctaaacaacaagtttaattgattaaagaagacgttctgtggagcgtcttttttatgttgatgagatggatgacaacagctttttgaaatgaaaagtcgtataataacagtattctaaatgaaattggagatcataatatggcagaattgatgcgtttttatcaaagctttcaaccggaacattatcaagtttttttagatattaatcgggctcaaaaacgatttagtggtcggacaacaattaccgggaccgctaaggatgcggtggtcttaattcatcaaaatggtttggtgattgaaacggtaagtgctgcggggaagagcgtgccatttacagttgataatgacgcgaatgccttgaaggtcgaagtgggccaaccaggcgaagtgacattggtcatttcatatactgctgttttaacggattcgatgatgggcatctatccttcttattatcaagtcgatggggtgcaaaaagaattgattgggacgcaatttgaaaccaactttgcgcgccaagcttttccatgtgtcgatgaaccagaagccaaagccacttttgatttagcgattaaatttgacgaacacgaaggcgaaacaatcctcagcaacatgcctgaaaaagaagttatcgatggcgttcatcattttgaaacgacagttcggatgtcaacgtatcttgtggcgtttgccttcggtgaactccaaggcgcacaaacgaagacgaagagtggcgttcaagtgggcgtttttgccactaaagcgcatcaagccaacgaactcgaatttgcattggatattgccaaacgttcaatcgaattcttcgaagatttctaccaaacaccatatccactcccacattcatggcagttggccttacctgacttttcagccggtgcaatggaaaactggggcttagtcacttatcgagaagcttacttattgctcgatccagataatacggcgctaacgacgaaacaccgtgtagcaaccgtgattgcccatgaattggcgcaccaatggttcggcgatttagtgacaatgcaatggtgggatgatctctggttaaacgaaagttttgctaatatgatggaatacgtcgccatcgatgcacttgaacctgattggcacatttgggaaagtttccaaacctcagaagcatcagctgctttacaacgggatgcaactgacggtgttcaatcagtccacgtgcaagttaacaatcctgctgaaatcgacgccttatttgatggcgcgattgtttatgctaaaggtgcacggatgctcgtgatggtccgcgctttaattggcgacgatgcattacgcgcgggtttgaaagcttactttgcagcccatcaattcggaaatgcaacaggggctgacttatgggttgcacttggtaaagccgctaacttagacgtcggtgctattatgaattcatggctcgaacaaccaggttatccagtggtaacggctaaagtcgttgacggacaattaacgcttagtcaacaacaattcttcattggcgaaggccaagaggttggccggcaatggcaaattccattgaagagcaactatgcggctgcaccattgttgatgactgaccgcaaattagtgcttggcgattacgcgcagttacgtgccgataatgggcaaccattccgtttaaatgtggggaacgaatcacatttcatcgttaactatgatcaaacgttattcgacgatattttaaaagatagtgctgaaatggcaccaatcgcgcaacttcaattactacaagatttacgtttattggctgaaggacggcaaattaattacgccgatgtcgttccagttctagcaccatttgctaaaagtaattctaacttagtggctgatgcactttatacagtggctggtaatttgaagaagtttgtcacagccggtgaaacaagtgaacaacacttgcggactttcttcgataaattgagtaaagcacaagtggcacgcttaggttggacggttcaaccaacggataccaatgatgatcaattgatgcggccgacagttttaagtgcagccttgtatgctaagaaccaagcaccgattgatgcggcgcacgcattattccaagctaaccaagatcagttggcaactttaccagctgctattcgggtactagtcttgatgaatgaagtgcaaaactttggtaacgccgcgctttatagtcaactcttagaagcttatcgtcaaactagcgatgccagctataagaacgacttgagtgctgccttaacacggacgactgatcctgaattaatcatcactttaattagtaaatttgaagatgccgggacaattaaaccgcaagatttacgggcttggttccggggtttactcgctaacgatgcgagtcaacaagccacttgggattggattcgcaatgattggcaatggctagaagacacagtcggtggcgatatggaatttacaacttatatcacatcaatcgcggcagtcttcaagacgccagaacgtttagcggaattcaaagccttcttcgaacctaaattagataccccaggcttaacccgggaaataacgatggacattaaggtcatcgaaagtcgcgtggccttgattgaaagtgaaaaagaaaaggttaatgcggcaattgcaaagtgtttatagttaaaccggtgtattgcaaaaactaaaagatgggtttgaatagcaatcacatagattcgccaaccaaagcattttacagattaaatttaatttgaggagtactgagatgacgattaaattagttgcgattgatattgacgatacattattgagttcacagcaccaaccgctagccagtacgaagcaacaagtcgctaaggcgcttgaacaaggtgtgaaggttgtcttgtgttccgggcggccattagctggcgtgacaccctttttgaatcaattggggattactggtgacgagcaatatgtgattacgtttaacggcagcatcattgagacggcggccggtaagattctaaaagagtcagggatcagccgtgaaacgtatcaagccatcgatcagttttcacgggaaacaggtttagcgtataacgtgcttaatcagaatagtgcgatctatacaagtaatctagacgttgatcccattacggttgttcaagcttgggaaaatgaggcggggattcatatccgtaaaccgagtaaagtcgctcctacaatacaaatggtaaaagctgtctttactggaacgagtgaccagctggacgcacatgaatcacaagtgcgcgcacaatttggaacggataactatgttgttcgtgcggctgaccgctttttagaagtgatgcatgccgatgtcaataaaggcaaagcggtgcaatatctcgcgaacgagctagggattgcacctgatgaaattatggcaattggcgatgagaaaaacgatattccaatgttccaatttgccggaactgcggtggcgatgggtaacggatcagcagaagcgaaagctcacgtcgactttattaccgccgataacgattctgatgggattgcgcaagcattcgatcgatttatttttacagtataagaaaaagccccggacaaaagtcgggggctttttctatgttttagaggtcttcaccattgttggcaataacgtttttgaaccagtagaacgagtctttacggcgtcgttcgagcgtaccgttgccgtcatcatcttggtcgacgtaaataaagccgtagcgcttggacatttcagaggtagaggcactaattaagtcgattggtccccacatggtgtagcccattagatccacgccgtcttgaacggcctctttcatctgtgcgatgtgtttgcgcatgtagtcaatacgataagggtcatgaatttgaccgtcagctgcaaccttatcgattgcgcctaagccattttcgacgatgaatagtggtacaccatagcgttcccagagattgttgagggtaatccgtaaaccgacgggatcaatttgccaaccccagtcgcttgattcgagatacggattcttttcaccgaggattaagttgccagctattttttcaccggcgggtttagctgagctgaccattgacatgtaatagctgaagcttaaataatcgaccggataatctttgattatttgtaagtcgtcaggtgccatttcaagttcgatgtcgtggtcgttgaagtaacggttcatatagttgggatattcgccacggacctgaacatctgtgaaaaagagattcaattcatcatcttcttgcgcttgacggacatcggtggggttcggtgttttaggataactttgcatccgcgccaacattgaaccaattttcgcatcgggcatcaattcatgacattgtttaacggcgatgctactcgcaacaaattgatgatgcagcgcttgatagcgcagttgtaattgctcatttggagagagggtatcgtcaaccgcgccggtaccagtgaatccccaagttgcggcattaatttcgttaaaagtcatccagtatttaacttgatgttgataacgtttgaagaccgtttcggtatagcggttaaacgcagtgatggtttcgcgactggtccaaccgttatatttcagtgtcagtgcaagcggcatttcgtaatgggagagggtcacgactggctcgatattgtattttttgagttcagcgaagacgttatcgtagaaggctaagcctatttcattgggttgcgcgtcatcgccgtttggaaaaatacgagcccatgcgatacttattcgaaaagccttgaagcccatttcggcgaataatgcgatgtcttctttgtagtggtggtaaaaatcgattccgtgccgttttggataaagggtatcggttggatcgtcaattgcgacttgaatgctgtctttagtcacggtgttcattgaaaaattctggcgatcggtcgctttttggacgacttcggcggtcgtgagccccttgccgtcgatattccaggcaccttcaatttgattagccgcggttgcaccaccccataagaaatctggtttaaagccagtaattggttgttttgaatacataattgtccctccaaaaattaaaatgtttggccgttatataacacgctaccgttggttttaatgacattttgataccagtagaaagaatcctttggtgtacgggctaatgtgccgttaccatcattgtcgcggtcaacgtatacgtaaccgtaacgcttgtccatttcacctgaaccggcgctgactaaatcgatacagccccaggaagtgtaaccgatacagggtacgccgtcggcaattgcttggcccatagcggtgatattttcttgcagataactgatacggtagtcgtcgtgaatttgaccatcagcagtgactgtatcacgtgcacctaggccgttttcaacgataaacagtggtttttgatatcgatcatagagttgattcattgtcgtccgtaagccaagaccgtcagtttgccagccccattcgcttgttttgagatatggatttttaagcgaggcgaagacgttaccttcagtttgttcattcaccactggatcagcactaactaaacgagatgagtaataactaaatgaaatgaagtcgactgtattggctttgagaatcgcctcatcatcaggtcccattgctaatacgatatttttggctttaaataaccgcttggcatagttcggataagcaccacgtgattgcacatcgatgaagaagtagccttcgcgattggtttcaagtgctttgaagacatccgctggatttggcgtattcggataagtttcgccagcggctagcatgcagccaatttgattatctggatcgatttcatgtgcaagcttggttgctaacgctgaagccactaattggtgatgggaagcttggtatttaatttgatctggatgagcagcatcggaaatgtccatgccaccgcctaagaacggaatgtggagaatcatgttgatttcgttaaacgttaaccaatagtgaactttacctctatagcgtttaaaaagcaccgaacaaaagcgcaagtagtggtcgatcatctggcgattggcccagccgttacacttatccatcatcgctagtggggtatcgaaatggttgatggtcacgagtggttcaatgttgagctcgcgacacagatcaatcacgcgatcgtaaaaggcgagaccggcttcgttaggtgttaaatcatcaccatttgggaaaatacgaggccagctaattgatagccgataggttttaaagcccatctcagccaccaagcgcaggtcttcttcataatgatgatagaaatcaacggatttgtgacttggatagaagtcgtattgagtcgcttgcgcttttttaggattcattagggcttcccagcggccatggtgagcatctggcaaaatatcaacgagcgacaaacctttgccgtcggtttggtaagcaccttcatattggttagcggcagttgcgccgccccagagaaaatcttttgggaaaggggtgtgattagtcatctttagtctcctttgaatgttattttaaagttaagagttgatcgccagtagacacagttccggttgaaatcagaggtgccactgaatcgtacaaattactattagtaatgatgaccggtgtcgcgatttcgtaaccggccgcttgaatggcttcaatatcgaaggttaataataaatcaccggggaggactgcttgcccctgtttcacatgtaccgtaaatggtttgccctcaagttggacggtatccatcccgacatgcattaaaatttcagcaccgtgttcagaattaataccaattgcgtgtccagttggaaagacgaggctgactgttccggcaacgggtgcgaaaagttggccatcagaaggaatgattgccacccctttgcccatgacagctgatgagaaaacaggatcttttagttctgaaagaggtattacggtgccactaaggggactagtaatgatttcaggtgttactttggcaggcgcttctgtcggaggagtaggtgccataggagcagcgggttcaacggttgccacttgatcttccttagaaatgccgaagaaaagtgttaataataatgcaattacgaaggcaacagcggcagcaattagcgcaccgtaaacggtcatatcgagaccggtctttggattgataaagttcggaataccgaagacaccgagtccacccacgaggtagccgcgagtgccaaataagccgagtagcaatccgccgactgcaccaccgatacaactgaagatgaatggctttttacgtggcagtgtaatcccgtaaattacgggttctgtgacaccgaaaatcccagagatgaaagatgaccagcctaagcctttgagctttttatttttcgttcgtaatgtgatggctaaaacagatccgatttgtgcaaaggatgcggcaaagacaagtgttaaaatcgtgtcgtaacccagtgtggaaatgttgagaattgccagtgggacaatcccccaatgaaggccgaagataacgagcacttgccagaggccaccaagcactgccccagtaactactggactgaattgatagagcgcattactaccagcgcctaatagatcaccaagccaagttgacagtggaccaatcactaagaaggtcaccggcacaacgacgagggccgtacaaaacggtactaagaatgtccgaatcacttcgggtaagacttttttgaagaagggttcaacttttgaggtgaaccaaacagcaaccacgattgggatgacggatgacgcgtaactcatcataatcactggaataccaaggaatgttgtgtaaattggtgattcgaatagcgtaccggcaaacaaagtgtaaagtggtttagcgcctgtttgcgccagcgctgaagggactcgtcccacgattgacgggtaaacgagggaggccccaatcaccataccgaggaacggattgactttgaatttcttgctggcactgtagcctaacataattggaaagaaatagaagaatgaatcgccgagcgcaaatagaatttgataagtgccagatttgatggtgagccaaccgactgcgacaaagagggcgacgagccctttaatcatcccggttgccgctaagacgccaagcgttggtgcgaagatgccagaaattaaatcgatgaatttatcgagtaaactcattttaggttgttggtcgtcatcatcagggacgatgccttcaccggtaatattgccgattttcaaaagtgcgtcataaacgtcagcgacttgattaccgataacgacttggtattgaccaccactttggacaaccgtcacaacgccgtccatattttttaaaatatcagtgtgcgcctttttttcgtccttcaatttgaagcgcaagcgcgtcgtacagtggacgacgctgcggatattttcgggtccgcccacgtttgccaagatgtctgttgcaagttgttcgtaagccatgatagtacctccttagattaataattgttaaaacaaaaacccagctaatgaatacagcctaaaaataggtcgcattcgttaactgggttaatgcctgatcgaatcagtaacacactattttattcagtttgttgatgctgggtgacacgccagatatgcaataataagtaaacttcttcgtcggattgtaaggcccaatccatctcaagtttcaaaaatgccgtaatttgttggacaacttgatacgcttgtggataacgtgtgatcatcatagcaagtagtgccggatcaagttgtgtgtctgtttcttgcgtctttttgagacgtcgaatgatgaagtagcgaagatgggagatgaagcgactgtaattgaatgactcttcgtctagcacaatgccgtagtttttttggacgataccaatgatgttagcgaccaacttggccatggtcatcgtgtcttcgatttcactgtcgccgtttttgatatttacaaaatgataagtgaggggcactgcttcaccatcaggtagtttgaagcctaatttttgattgatcagttgaatagtctgctgcgcagttttatattcagttggaaataaattacgtaattcccagagtaatgattgatcgtttaacgtgacatgggcgttgatgcgtttaacggcgaattggagatggtccgctagaatcagatattggcgatcgttaatcttagtatctaatgctggctcaactaacgtaacgatttcggacataatggttagcatttttgcattgatttctgttagtgcctgaacttgggttgcatcgaacccctttgaaccggttgcgataaaacggcgttcaatctttgattcatcgaccaagtcgccagggtgtttgccaaaaccaacaccgttgccgattacaatccattcaagcgcttggccgtcttcaacgagggcagcattattattaaaatttttttgaaatttcatcttactctcctcttttttgcacggcaagaaaaagacccactaattcaacacagtctatatgtgtgaagagatagtaggtcatgcctgatcgaatcagtaacacgctatttatatgattactataagctatttatgtaaacgttatcaaatgataaattaattaatttaaaaatagcccttgtcttgaagtgtactttaaggtctatacttcattttgttgattagagattaaacgaaatggaagttattaaaatgaaaaagacaaacaagaaggttattttagcgattatcctcatcagttattttatgattttattggataattcaattatttttacagggacggttaaaattgccgccgaattaaacttaagtcaaacaacattatcgtgggtcacaaatgcttactcactaacgtttggtggtttgttattacttggcggtagtattggtgatattattggccgtaagcgggttttcatgattggactgacagttttcgcggtagggtcattattagttggccttgccaatagtgcggtgatgattattttagcccgggcatttcaaggcattggttcagcaatcttggcaccaacgactttggcactcttaatggacagtttttcaggcgaagcaagaacacgcgcgattgcggcttatggtgacacagctggtattggtgctagtattgggttagttattggtggtatttttgccagtctactatcttggcgggacggctttttcatcaacgtaccgattgcgattattatgattggtttaacggttcttttcataccaaccactcaagccacacaagctaagcgattagatttaatcggtgcactgacgtcgattattgggatgacggcacttgtttatagcctagttggccaacaaggtcgcttactagcattgttagtagcagtcgtttatctggcaagaagcacgaacgaaacaaccaatgatgccattgcgcttgtttgctgatcgcgaacgactagggggctatattgcgcgcttcttctatctgggtgcaatgttgagtatgtggtttttgacacctcaaattatgcaaacccatttaggttttacgccccttcaagcagggattggctttttccccttaacggtggttaatttcatcgttgccttgcaagtttcaaaattaacaacgcgctttggtaatacgaaattactaaccgtggggattgcaaagaccgcaattgggatgtgtgtcttaggctttttctcagagcaagttggctatgcgctaggtatcgcggttcccatgatcttgatggggattggacaaggtttaacactcagtccattaacggtcgccggtgttgccaatacgttacctgcagatgctggcgcagcttcgggcgtggtcaacatggtccatcaaattgggggttcaatcgggatgtcgtttattgtggctgtttcagcgacttttaaaaacggcctaacaagttaccacgtggcaatggggttagcgaccgttctcttgattggtgcgttgctcgcggtgatcggcttaattttaccaacacttaaaaaggagtctgaatgatgaaaaaaatcttaattattggtgcaacaggttcaattggttcagaagttaccgcacatttattagacgaaacggatgcgcaactcactttattagcgcgccacgttaatcagcctaatcaagaacgcgtcacgtgggttcaaggagacgcgaccaatctcgtgcaactcgaaaaagtaatgcgtaatcaagatgctctttttgtagcggtcagtggtcaattgccccaagtagccaaggcagtcgtgacaacgatgactaaattgcagattcataaactggttttcattgcttctatggggatttataatgaaattccagctagcattggtgcttcgggtaatctggcctctaatgggatgttgcaagcctatcgcaaagccgcggatattgtcacggagagtactttgaattatactgtggttcgacccggttggtttgatcaaggtagccatgattatgaagtgactggccgcaatgaaccttttggcgggcatgacgtttctcactgggcaattgctgatttagtccggcgggtgcttgaagacgagcaattatatgcacgaacaagtgtcggcattaaccggccacaataaaggagttacgtgagatgaatattaaagaagcgagtcaacaaacaggcgttaccgcgacaaccattcgttattatgaaaaagagggcttaatcccagcgattgatcgcaacgatgttggcgtgcgagcgattgacgaccgaattattagaagaattaatttcgtaaagacaatgcgtgcagccgggatgagtatcgaagcgcttaaggaatatattcgtttatttgatgcccaagaagataatacagctcagcagtttaaactgttgaacgaacaaatcgcaattatggaagaaaagcgcgatgaccttcaaacggcaattgaccatctgcgttggaaggttgatcactatgaagatcatatggcagtcacagaagaagaattaagagaggttgaaaaaaatagagctgatcagtaatcactgaagttggggcagtttatactgtgccaactttttttaaaattaattgttaggtttttgctgacacaacctaactaacgcgttaaactaattttcgttaggttaaccgatatcaaaactaactaattatgaaagcagtgatcaatatgacaaatgaaacacaagaaaccatggcgttattcgctaaactcgttcaatcgcggtattttgtggcatcggcatggatgacggtcggcaaagaaagacggcgcgattttatgaatacgaagggtaaatcacgattattgaatttattggccgctaaagatgggctaacgaatgctgaaattacagaattactagatattcgtcctagttcagtgagcttgcaagttaaggcacttgaagaagatggctatgttacacgccaagcatcagcagcagataaacgcgtttccctcattttcattacggataaaggacgggactcaatcgaaaaaggtgatttggaaactgataaattatcagaaacaattttggctggcttaagcgaatctgaaatcaatgaattacgagtgattttaagcaaaattgctaataatgtacaacaaacacagtttgattcagcctttttcgaatacgggcaccatatgcgtcatcaaaatcacggcgattggaatcgttcacgattcccttggtaggaggttgttattatgcaacaaatgagagtcgcaccatctaaaagtcaatttagtttcaaagattttctaggtttaattaagaatacaaaacctaaatattggcagttgttcttgggtttagcattagggctagttgcaactggtgttcagttagcggttcctagttacgctaaacaattgatcaatagtttttcaaaacaatttaatatttacatgttgattgggattgttgttttattcatcttgagtgcggtgatcagtgccgcttcgggatcgctactcggttttttcggggaggatgttatccagaaattacggaataacatttggcataaattattgcatcttagagtgagttattttgatgacgtgaagtcgggcgaaatgacatcacggttggtgaatgattcaactcagatcaaagatttattatcacgatcatttcccgggttagtaacagccattttcacaattgtgggggcattcgctattatgctcttcatggattggaaaatgactttaatcatggccttttcagtgccattggttatggctgtgatgttaccaattgcgaagaagtcacatgccattggccacacccgccaagatgagttagcgcgtttcaacggcgaaacggatgaaacattgagcgaaatccgcttagtcaaatcatcaaatgcagaacaacaagccagccaacaagggcaaacagctattggtagcctttataagattggtttacgggaagccatttatgattctgttgcgggtccgattatgaccgcggtcatgatgggcttaattgttggtattttggcttatgggtcagcgcgagttgctcaaggcacaatgacaattggcgcgatgttctcatttttaatgtacttattccaattaatggggccagccgcaacactagggcaattctttacaacgctctcaaaggctagtggttcgacagaacggattcaagaattgatgcaagaatctgaagaagattttgatcatggaacggcggtagatgtcgaaggtcaaacattgaaagttgaatcagttgattttggttatgaagatgatcaaacgattttacatgatttatcatttgaagcgaaacctaatacggtagtcgcttttgcaggcccttccggtggcggaaaatcgacaatcttcagcttattagaacggtattacgaaccaaatcagggtgcaatcaagattggcgaaacgtcaattaacgatgtttccttagcggattggcggaaacaaatcggtttcgtcagtcaggattcagctattatggcggggacaattcgagataacttaacttatgggttaaccggcgaatacgcagacgcacaattatgggctgtattgcagttagcttttgctgaaaagtttgtgcgtgagatgcctgagggtcttgatacagaagtcggtactcggggtgttaaagtttcgggtggtcaacggcaaagattggcaattgcgcgggcctttttacgcgatcctaagattttgatgttggatgaagcgaccgctagtctagattccgaatcagaagcaatggtccaaaaagctttggaaaccttgatggaaggtcgaacgaccctcgtcattgcgcaccgtttaagtacaattgttgatgcagatcaaatttacttcattgaaaatgggcacgtttcaggtgctggtaaacatcaagaattagtcgccaaccatgaactctatagagaatatgtggagacacaattcaatcaagactagagtgcgtcattgacggttaacttctgagcattagcacaatgacgtgaatgaacgatagcctcgttcgtttgcggcatagcgctaagcggaagaagttgttaatgaaagcacgttaaaaaaagcgtgcgtcattaactgattatcttaggctctttcaaaaacagagtagcgtccgaatcaattggacactactctgttttttgttttaagttataatagtagataagagcaacaatttagtgcataatatatcaatatttgttagctattggagattataagatgaatgaattttacctagtggcgctactgttagtcggcgtcatcgtggtcaacgtggtcaagcaacttgtaccacggataccagaagcctttttattaattgcgatgggctggggcctatcgtttatgccagtgttccacaactttcaattggaacctgaatttttcatgttactgattattgcaccgttgatgtttatcgatgggcaaaagcaatcgtttgccaatattcgtaaaagattccgagggattttcctactctcggttgtcttagccggtgtcacagcagcagtagttggcgttatgactaagcaaattgaggcccggcgcttgcgctggccgcaatcgtcacaccaaccgatgcagtcgcggtcaaatcaatgaccggtaacaatgatatgccaaagggtgtcggtgaagcactcgaacttgaatcgctatttaatgatgcgaccgggttagtgatgctggaccttgctttgtcagtgctctcaaaagggacgttctcggttgttgaagggattggtcatttcctattcgtagctgttggtggggtcttattggtaatgcttcgctttaacttgaatcgacatggtaaaaatccggaattaacgacgattccgattagtttattgacgccatttgcgatttacttattagcagaacattttggcgtttccggaatcttagcggtggtcgcaaccgggattgaacataactgggaagctgatcgtttacgattaacatcaactaacgttcaactcacttcacgaacaatttggaatattctagcggatattctcaatgactttgttttcttaattttagggatttcgttaccagaagttgctcgaaatgtgacgcaaatgggttggcagggtgctgccgccttattaggggtcagtgttttagtctacgttgtcatgtggattgtgcgctatgtttgggcattacgtggggatagtgcttcaatttcagctttctttggtgatcgaaaaagtgatgagcggccattttttgcccggttattcgcagtcagtgggattcacggtacagtgacgttagcgatggccttttcactaccgaataagattgcagggcacgcctttccatatcgggacgaattaattgcgatcgcgactttcgttattttaatcagtatggtggtcagctcgattgtgttgccacgtatgttgccacaaaaaacggaagcttatacaatggccgatttggatcatatccgcaataagatggtcgattacgttattttacaaatgcgttctcaaattgaagatcatgccgttcgcgaagcactaacggatcagctccaatcacaaaagagcaatcgattaacagtggatcgcgcggagtcgacggcaaattataatgcgttgttgagtgagactaaggaagtggtggataacttccttcattgcgaggacgttaataatcgttatagtccagaaatcgttaatatttatgacaaaatattacgacgcgtactggtcgaaccaaaacgtaatcactttaccttgcgaatgaaacattctattaagcattggaaaaaggaagtattgtggcatacaagtcatcgcgtgattacgcatgaacaacaacgccgtttccgggatgcgcgaattgccgaaaaccctgaattgtcagaacagattaaacaacgcgaagtgatgcgggatgatttattagcacttaataatgaagtgacagatacgattgatcattatctcgatacggttctagaaaatcgcttgaagcaaaagcatagcgataatgatttcgtttatctggttcgtcgtacgatgaatcatttctgtgcgcacatcaaacatgattatcaaaagagtgcggcaacagtgccagatatcttatacgttcaagcattccaacatgagtatgatttcgtgcaacaaggcatcaatgctggttatattaaccaatcaattgctggtgtgttgtataccgaaattaatcaagcacagttattacaactgcaacaattccaagaaacagaagagatggcgttgattgaagcttaatcaatagtaactcaaaagagccgttcagattaaaatctgaacggctctttttttataattattcaaacattttcttagtagcgcgcatcaatgtcttgatatcacgatcgtaacgtggtgtgtcgactaatttcgccattggaatcccagcaaagtggtaagccgcaatttcgccagaacgaacggcactttgttcagtaaaaatcatctgataaggttgttcaacaaattcaccagtgaaggctaagttggttgaatgttcagggatgacctctggacgatctgtcttggcacgattgttgaagagtgctgaagcatatggcatgtaaacaggaatgttattgatgatactgtccataatttcagcttccttttcgcggatattgattgggccaggatcgaccttagctaattgaccaatcaattcttgtaacatttccttaccagtcatttcgatgtaaggcttgtccacaaattcaccgctccgacgtggatagaggaagtaaccccagataaccgcttcgtttggtttttgagttgtgaagtgaggttgatggtgaacaacaatcgacatattaacatctttttgaccaagtggtgtgattggtttcgttgataggaatgagtttaaggcattccctggaatttgagtggtaatgcgttcgatttcgtttaataaaatatggtttttagtcgttaaagtaaagctgacccattcactggcattgcggtcagcgaagaatttatcggcattaccgaggttgtagaatttagaagcaatttgtttccacaaaccggcagcagcaccgtaatccatattttcaggagctggtgtgttgtaatcaccaagtgttgcagaatcagtgattgaaccgttcgtgaagataacagcagtatcgtcatcaaccgtgatgtgttcaacttcatctgtttcagtattggtcatcgtcataccagtaaccgtgatttcatcggtcatctgagtctctttaaagtctaaatcagtgattcgacggttgagaataatgcggcaaccttgatcttttaagtagttaataagaggtaacatgatgctttcgtattgattgtaacgtgtccggttaacaccgactaagtgttcaatctgtgtgaattcataaatcatttggtgcatataccggcgtaattcttgtgcggaactttgtgttctgaaagcaaaggttgtttcccacatgtaccagaagttagtttggaacatatgtggatcatctttgaagtattcggcaattgaaacattgtctagtttttcttcttcagagtcgggcatcataattaatttggtcattaataaccgatctttattattgaagccgaggtggccagcatctaaaatacctttgctaccttccaataaacgcgctttgtcgaacgtgcggtgttgcgcgtcgaatgaacgggtatcttcttcggccgtcatattaggttcagttgctgaaggaatccgatctaaaagatccattaaatcgacgtaagtccggtaattaagcatccggccaccacgggcaacgtaacctttagtattttctagtggatgattcttgttccagtattcatcggttgtttcggaaacaggtgcaccatcgtttgaaccatggtcatctaatgagtagaatgtaatagcatcaccagaccaaccgccttcttgaattaaatagactgctgcggccatgtttgaaaggccagcgccaatcatgattgcttttttcttgatcatatgaaaaacctcctagattcagtttagaaattactagcgattaacgactttcaaacttttcgtaatcaactgaatcatctctaaatagttccatttttttagcaactaagcaagcaccggtgactgtgatccctgcaagtacaagactgcctaataagaatttcttcatgatattcgctcccttccattaactaccttggatatctatattatactgcgaattgaaaaaaacaaaaaggtaaaacccttacagaaatgctgataaggatttaataagaacaaatgccctattaaataagggaaaaggggactaattaagtttaggttaagtcgctgttaattatttcctgggaaatgaaaggtttgtcaaaataaagcgccaaataaggatgctagagaatgtcgcgcgtttattgaagcggggtgtgggataatagctaggcaatcaatggttattaaatgatactcgtagtgacaggaggaatagtatgaacattggtcaccaaatcaaacaaaatagattgaaacgagaatggacccaagaatacttagcccagctgttgaatgtatcacgttcaacagtttcgagttgggaagttgggcgaaactaccccgatttagaaacgattgtggcgattagtgatttatttgctatttctcttgataaattattacgggaggacagtgtcatgaccaaagaagtttcgaaacggatgcacatgaacaagtattataaaatcgtcttgacgatgattgcagttattttattaggattggtgattagtaaccgacgtttaaaccaattggaacaacggtatcgggagaatttaacgcattacggctggcatcttgataaagataccagtccatatgccaacaatagtgcgtatgaacttaagacggaggatacgacctattacacttatatcctaccaactggttataatccaattccgttggaagaacgtaaggtgaatattatcacgcgacgaaatggacacgttgttgatgttttagatagtcagcatattaccgtcgtcttttcgaagtcaaatgatgccaaactaaagtatcaaggtagtgttcaagttaatctagcaggtgaattgattgctgatcaaccacggttaacgggtgctaagaaggcgtattttaaagcgtatttaaagcaacaccaaaagacttatcaagcattaattcaaaatagtcttcagaagaaacaagagatcattactaaacggtagttaatttaaatttaacgggtaaaaatgcttgacctcaagtcagcttgaggttgtaaagtagtcttatcgattagaaaaaggagacttttaaatgcaaaaattatctgccttaacggccccaatggccttaagcaacggtgttacaattccaggattaggttatggcacataccaaacacctaacgaagaaacgaaaaaagcggtcttagaagctttatcagttggctatcgccatatcgatacagctgccgtttatggtaacgaacaaggtgtcggggatgctttgaaagaaagtgatattgctcgtgaagacatctttgtgacaagtaagttatggaatacggaacgtggctatgacgctactaaggctgcatttgcgaaaacaattgcgacattaggtgttgattatttagatttatatttgattcattggccagcaaataccaaacaatttggagctaaagcggccgaattaaacgctgaaacttggcgggcgatggaagatctatataatgaaggcaaaattcgtgcaattggtgtttctaactttatgccccatcatttagatgaactcatgaagactgctgtaatcaaaccaatggttgatcaaattgaagtgcatccaggctggccacaagcagaagctgtgcgttataatcaagcgcatgacattttagttgaagcttgggcaccacttggtgaagcaagtgctctttctaatgaaacgattgcggcaattgcgacgaagcacggtaaaacagcagcgcaagtttgtcttcgttgggggattcaacaaggtgtgttaccattacctaagtcaacccatcaagaacgtatggcgcaaaatactgacatctttgattttgaactaacagatgctgaaatgacccaaattagtgctttggaaaacttaggcggtcaatgcatggtgccagatgaggttgatttttaatcaagcgcaaggaaggttaatatggcattatcaattggcgaagtcgctcaacagtatgatttaagcattccgacactacggtattatgaagaacaaggactgctaccgtttattaaacgcagccccgctggtcggcgtgaattccggcaagctgatttggattgtttatgtgatattgaatgtttgaaaaaaacgggcatgcagttgaaagacattaagcaatatatcgattggcgaaccgcgggcgatgaaacattggaccaacgcttggcactgattcaacaacggcgacaaatgttggctagtgagattgaatcattgcaagcagaattgacaaaactagatcataaagagtggtattacactaaagcaagtgaggctgggacagaggctatttttacagcggattgtgatacggaatacgaacgcgctcatcagaataagtagtcaaaaagaggcgaccttgataggtcgcctctttttgttaacagataaccaatattaatgaaggtttaaatccttttgcataatcaaatcgcgttgcgcatcgtcaccgagttggaagatatgaccgccaatttgcttaaagcctaacttggtataaaaggcgagtgcggcagtgttgtgttcccaaacgccgagccaaatatgggctttatgggcctcttgcgccattttgatggcgtattcgatgagttgtgtgccaagaccaagtcgtttaaatgttggtaggatatagatgcgttcaacttccattgaatcaggattaggattttcggtttgggcatcgttactgtttaatttaaggtatcccgcgatattgccgttgtgtttaataaagtagaaggctgaattaggattagcgatttctgaactaagttgcgtatcactgtaggcagattctagatagtcagctaaatcctgctctgaattatcagcaccaaaagtatcggtgaaggtttgaatactgattgtttgtaatgctttaagttgttttgaggtaactttttcaattgacatggtaaaactcctttatggtttaatagggccgctgttgcccttttttgacttgttcccagtcggcggcaacgttggtgctgactttggttaatagttcgtgtaatacctgggtttccgctgttgttaggccttgcagcgctacctgattggaataatcgttctcccgtttaatctcgggatagatggcttggccggctggggttaaatagagatgtttgattttgagattggtctcatcagcttggcgggtaattaacccggcacggcttaatttttgaatggcacgagtgacagtagcgcggtcaaccttaatcagttcgaccaggcgctcttgaatgatgcctggattttccgcaatgcgaacgagatagagatactggccacgggttaaatcgaattttttgaattcaatattagcaatcgaatctagtgagcgagcgatgacgccaatcggtcttaaaatatctttcacaataatgcctccctcttgttgaatagtagtataaaatatttttattgtaaatgcaacataaattaaaaacaaattattagggtaatttggtggtcaatgctagaataatggagctgacagctattttttaatttaaaatagacgagatttttttaaataaaaggattatagtgttgatagataacattgtgggcaattgattcttgttaaattaagttaatggttaagtcattgaattgtaacaaaaatctctatataatatgggtataattagataacgggcttaaataataggagaaaataaaatgacattcaaaaaatcgattattagtgcagtgacagtaagtttggtaggggtaacaattgcatcaacgcaaccggcctttgcgagctcttcagccgcagctaaagaagccattcaaaaaaatcaagatgacgcgaaagcgctgttaaaacagattgctgccgctaacgaagagggcattaagctagatcaacaaattaaagataattctgccaaaattgcaactcaagaagctgtaattaaagaagcaactgatgaaattgataatctttcgactaagattgacgcagctaaggaagaagtggctaagcggacaactgtgttggaaggccaattaatctcacttcaaaagacaagtggcgacgctgttagtggcaacgtctatgtggattttattctaaattcagacaacctaacggatttggtggcccggacatttaccgttaataagttaaacgaagcaagtaaagaagcgttggcagatgttaatgaatctaaagcgaagttaaccgatttgaaggataaccaagaaaaagctaaagctaaacttgaagctgacaaagctgatttagaaaagcaaaaaacaaacttgttagacttaaaggacaaggcaactaagaatcaaaatgacttaacgaaaaaaattaacgataataaaaaagcattaactgctttgaaagcggattatgacaaagcaaacaaggcagaaactgaaaaagaactcaaggaattagctgcctcagctgctgaaggtgaaaagggaacggatagttcggttggcgaaggtaaaaaagcaacgagttcagcgggtaatgcttacgcttggggacaatgtacttggtatgttaaagctgttgcgccatgggctggtaatagttggggcaatgggaaccaatggggcgcttcggctgcagccgctggttttacagttgatcataatccagctgccggcacaattattagctttgctgctggccaaaaagttggttcatgggcagcagatccttcatatgggcatgttgcctacgtccaatcatatgatgcggataagaacactgttacaatctcacaaggtggcttaggctttggtagtcctgctggtcctaatacacaaaccgtttctaacgcgagatcattaacttatattcataaataatttaatattaaaaaaagatggtccctctattatcggcggatcatcttttattttgcaacgcaatgtttcacgtgagacattgctaataagcgctagattgaagaatggtactttgaatctggtatactggttctaataataattaaggtgacaaactaaaatgagtggtttttggggaggttaaggcttgcgacgattgtttaggttcttaaaagcgaattttcaggcattcggacggcattggagcgtctatgtattattggttgtgagtatcaatcttgttttgacgagtttaattgtgccgggactgacgtggggggtaaaccgtttattagtggttaatgggattggatatctgacctacacgaacttcgtttcagtattgactaaacacccgctcgttttaattagcttggttttgctggtgctgttgatttgcgggttagtctatattcaaatggcttttttattccggcaaatcaaacgaattcaggaacagacgccagcatcacagtggcagcttttaaaacaatccgggcatgacttattgactctgaagcccttaacaatgctgattatgattggttattttctgctgattctaccgtttgggcagattatttttaaatctgttttactaaataaagttaccatcccagcatttatcattcaggatatgtggaccacacctaagatttggggtcccatcattttggtttacacgttagcattgattctgtcgattcgcttaatcacttttttaccggagacaatcttcaataaaaaattatcgacaactcgactcttgcaaaaatgttggcaaacgacgagaggtcggttttggcgtctattaattaaggttggggttctagcaattgcaattacgctagtcggagttttaagtcaactactattctttaatctacaacgatattacgatcaaaatttaccgcattatgcactcttgttagcaattttaaatctttttatcctagaaattatcagtcagatattgttagcgatgagtattgtgatgattttacaactgatcttaaaacaggcaggttatctggtgccgagtgaaacacgcgttaaagtgattttaaaacagcggtcactgagaatacgaatgcgtcaaggcgcagcgatgttattgttgattttagttgccgctggtgtcgccttatacgattatgcttatttagaaggtgcgatggataacagaccagctttgatttcccaccggggtgttgatgacggcaatggcgttcaaaatacgattccggccctccaaaaaacagcgcgtgaaaaaccagactatgtggaaatggatattcaagagacgaaggatcatcaattcgtcgtgatgcacgataacaatctcgaagaattagccggagttaatcggaccgttcatgagttaacactagccgaattgacggcattaacggttcgcgagaatggttattcagcaaaaataccaagtttcgaccagtatctgactgctgcggaaaaggcgcaccaacgattattggttgaaatcaaagtttcgcctcaagatagcccacagatgatgactaactttatcaaacgttaccagcaacggctattgaaaaatggcgatcgtatccattcgttgagctatccagtcgtagcggcattgaagaaacaagcaccgcgcttatttgttagttttatcttgccgtataacatcagttttccagaaacgccggccaatgcctatacgatggaagccacaaccttgaacacggcctttattgatcaagcacatgccaagaaacaagcggtttatgcatggacggtgaacgattctgatgtgatgcaacgcttgttattaaccgaggtcgacggtattatcacggataacttgagtgatttaaaagccgtggtcgctgaaaataatgatcatcccagttatgcgacaagactcctaatttattccagtcagttagctggtttcagtggcgaatctgaaaattaaagcaggataaaaaggcagtctaaatacgtttagaccgccttttttgagagatttctcattgagagcgtttttgttttggaaatttgaatgaagtagtagacgaccttcatattttccgataaagttaatacttatagttaatttgaggagtcgaacgaattcatgacagataaaatggcaacaagtgacaaagtactatacggtgggttattagctgccgcagggggctttgactcctatacctttttagtgcacggacaagtctttgccggcttacaaacggggaacctaattttgttggggacgcacattggtcaaatgaaatggtcggtattaatccagcatattacgcccattttggcctttatgttagggacgattttaacgcgggttgtgcaacatcatttcaaggaggccgattccattaacaaacggcaacggttaatcctaggggttgaaattgccgttttaacggtgattgcagggatctcgccatatattccagacttgttggcgagcgcatcagtgtcgatgattgccgccgcacaattacaagaattccgggaattaaatgggggaccattcacctcattgatgatgaccgggaacgtccggacactcgcagaaagtttatacgatggcatttttaaaaagaatgcccaagcgcttgagaaagcttgggaaattctaagaatcattattagctttacattaggtgcagtgatgaccggcctttgtgtctcattactgggcgaacggaccattattttatcagccgtctttttactcgtgacgttgttaattttacaggtgaatccccataaaaaaatctaatcaagtggtttgtcgcgaaagtggcaaaccatttttttgattagtaaaatgttataattaagtatactaaagtaaagcgaggtttgatcatgaaaaaatcccccctacttatcggtttattaaccatagcgttgctagcgggttgctcaaatcaacaagctaagcaaacagcgtcaactaaaaaagcgaccacggttaagcaacaaacaccaactaagctccaaccgaaagtgagtcttgaaaaggcacgtgagttgtttaaacagcagtatccaaacgcggatatttcagaattgcagctaaaaaagcaactgaacaaaacagtttatcgcttgactggtttgagcgatactgaagaactcgcaatgcagattgatagtcaaacaggtgatattagccatttaacgaaagaaaccttagataccgatgaacaaaacggtgtcgcccgtcaaaaagaacgattcgattttaaatcgttaatgacgcttgaagctgctcagaaaaaagcccaacactattttggcggcgatgtcttggaagcaacgcttgaaaaagatgatggcgttgtttattgggaaattgaagggcgacaaaagcaccaaaagatgcaggtgaagatcgatgccacgactggtgaagtgatcgatactgagttagatgattaaagattaataacgggcagtctcctttagtgggggctgcttttttaatgtggttaagcataataaaaagttaggctttgctaactttttatttactttgaattaaatcggtgtacaataaacgtgttacaaggaataaaaaaagggagtgtgtgtgatgaataaagttaagggacccaaaaagcataagttgattgaatatgctaacgggccatctctggaagaaattaatgggacagttgaagtacctgagggtaaaacattttggaaaacgttgttggcctattcaggaccgggtgcattagtggcagtggggtatatggatccaggtaattggtcaacctcaattacaggtgggcagagtttccaatacctgttgatgtccgtgattttggtgtctagtttaatcgcgatgttgttacaatatatggcggctaagttaggcattgtaactcaaatggacttggcgcaagctatcagagcacgaaccagtaaatcgttggggattgtgttatggattttaacggaattagccattatggcgaccgatattgccgaagtgattggggcggcaattgcgctgtacttactgtttaatattccgttagtgattgcggtctttattacgattttagatgtcatgctattattattattaacaaaagttggttttagaaaaattgaagcaattgttgtggcgttaatcgtcgtgatttttgttgtctttgcttatgaagttgcgctatcaaatcctgattgggcaggggtaattgttgggttagtaccaactgctaaaacattcgccacgacaccaaatgttggcgggatgtcaccactaacaggtgcgctagggattatcggtgccacagtgatgccgcataacctctatctccattctgccatttcacaaacgcggaagattgatcgcaacaacgaagaacaagttgcgcaaactgttcggttttcaacatgggattcaaatattcaattgacgatggcctttttcgttaacgcactcttgttaatcatgggtgttgccgtcttcaaaacgggtgcggtcaaagatccgtcattcttcggattatttgaagctttatctgatacatcaacaatgagcaacgggattctagcgagcgttgcgcggaccgggattctatcaactttattcgcagtggccttgttagcttctggtcaaaattcaaccattacagggactttaactggtcaagtgattatggaaggtttcgttcatttacggatgccactttggttacggcggttagtaacgcgcttgttatcagtgattcccgtattaatttgtgtcatgatgaccagcaacaagccaccattggaagaacatcaagctttgaatacgttaatgaataattcccaagttttcctagcttttgccttaccattttcaatgttaccactattgatgtttaccgatagtcgggttgaaatgggtgatcggttcaaaaactcactcgtgattcgcgtgttgggttggttatccgtcattggtttaacttacttaaatatgttgggcttaccgggtcaaatcgaagcgttcttcggcgatcaggcaacagcggcccaattagcattagcggataaaatcgcctatgttttaattgcagctgttttagccctattggtctggatgattgttgaattatataaaggtaatcaacgatttgaacagcaactcgcggctcaagctgcggaataacttgaggaggggttaagatgtcaattttaaatatgagacgggtattagtcggcgtggatgattcagcagatgcgctattagcctttgaatatgcgattaaacgggccgttaaggatgatttagaattagtcattgtatcggtgctagaaaatgatgagttgaatgtctaccaggctttgaataaagattatatccacggtcaatataatgatttggaaaaacatgttttagattatcaggaacaagcgcgggctgaaggggtcaaaaacgtcagagcagtaatcgctgaaggggaaccaggcgaagcgattattaaagaggtgattccaaaggtccaacccgatttattgattatcggctcaaaagccaaagaaggcatcgcaaaatattttgggagccaagcagcctatatggctaaatacgcaccggtaccggtattggtagtgcgttaacagaacacgaaaaaaaggcgttgagacaaagtaacatggtctcaacgcctttttagggcctaattatggtaagctaaatgcaattatatagaaggaagtggaataagcgcatggatgaagtggctgaattttgggataattttgcggcggaatactatcaaattcaaaaggaatcgcaagtgccgattgtgaccgatattgaaagatttttaacagaacagcgcttgttgccaaccaattcggttgtcgatttaggcggtggtagcggcaggtatctaccaatactcgcgcaaaatagtcaacaatacacaattgtggatatctcagaacagatgttgcgttatgcacaggtggaaaaccaagcgctatcggagccgcgatcagtgacttatcaacaacaatcggtggccgatttttgccaacaaaccccagatcaaagttatgatttagtgtggatggcactcaacccggcggtaacggcggacgaaacactactcaacattacgcaaaaaagtcggcagtggtgtggtcttttacggctaacgcagaatagcgatgatttatttgcgccactggaacaacactttgggattgctgaagaaaaccccaatatcgagccaacgattatcccggcggtggctaaactgttaacaagtgctggctatcaagttcggcaacaaaagtttcaatatcaaacaaccgagactttcgaccgggcatttttagaagcttattatgcggaagtaccgcaagtattgctaaaggcttatttggaccgattattcatcaacaaaaaaacacgtgccagtacgacaacgcttgaatatacgttgttgtattggcacgtgtaaagggaggacattgattagaagccaagtgcaattaagccagttggcaggttttcaaccggtacgggataaagcgcaagaccggttttaaccgcggccaccagcaagctgttgaggactggtatctgatcagcgctaatggttggagatggcgttagtgcggtgggcacaattagtgcggtcaattgccggttgttgatccgcgataaaataatatcgggattccccaattcaggatcgctgtggtaagtgttagttgctcgctctgctaaagcaagagcttcttgacgtaagctgtgacggccatcttttagtaaggtggttagtaattcatcatccgtcaacgattctggagaggtctgaatggtttggtctaattggtaattcacgtttgttgcgagttctttgaagagattgagattaccaggtaaggtcaccacataaataggggccttttgtgggagtagttcggtgagatagcgatcaattacgcggaaatagttggtttgatcgatgagttgttcattatccttgaccacgtaactgtgggttggacttgagaagccttggaccacttcacctttacggtcagtcccaatgcctttttcaatcgttgttggcgcatcagctggtaatgggtagtcgcgaatcacgttttgttgaatggttttaagactgaagctcgttttgttgaggtttaaaatcgtgccatttaaactgagggccagttcggaacttaatggccgtaaatctggatgcgcatcaatcgtaaagtattcgctattaattggataatgcaaaatgagatggtagcatttattctcagtaatatagaaggcaattgattgcacatgagcgagttcttggggggcaatcgataagcaggcttcaacttgttttaaaaggcctgcttgatcgggatgattggcaagtagttggtcacgaatctgtttagcataactattcagttttattttgttggcgctaagtgcttgaccacctgtatctaagttaatgaataatgaaacaacaggctgacttgaatctgtgagtaactgcgttaaactatctggatataacatagaaacacctccatttgattagttcaagcgtatcatattgaaaagaagcagagaaggaaagtgctttctttaatttatggcgtttacttttagcgcctttgagtgggggattatgctaaaatataggtagcttaataagggaggatacacgcatgaagaaacaaacggcaacagttacaccaaccgcaatcagtaaaagcattagaacgcgtttttttgttttacaaatggtggtcattctcgttctcggaagtgtcaccgctaaaatcgtaagtggttttaacccgttaatgacggattcggaaattcttaataagacaatcttgatggccttaggctcaacggtggtcgcattgattatctggtatgtttcatataaattaattgctttccagattaaacgccaagttatggataaggaacttgaagatcgctatacttttaatttatctcatgctgctagcagtttaagcttacacattgtttattttatcagtattgtcgtgattgtctggttaatgatgagtgcgcaaagtgttcgggctgatttagacgggctgaacctatttaagacggatcaaccaaccgttaaactcgttgaccaacatagtatgaaacagattaatcgcttctataagaagacagataatcagtcagttcaatatttagggagtcagcaagaccgtgcttatttcaaagtagatcaagcaaccatcagtttgccactttctaaagttcaatttaatggtcaagatcaaggaaaagttaaaaatccattgaagattgaaacttatcaattaaaacaaccggctaacaaaaaatatttaaaaccaactatttatctgagtcaaaaaggcttgccaacggtgccagtgacgaagatgtatcagcactacacgccaaaatcaagtgaaactgttcaaaaattagatattgagtaaattaaactaccagattagctagattaaacggctttcatttggtaaagttataagtgagtacttttttaacaaaggagattaataatatgattgaagcagtaaatcttagagcaggtatgacgtttgaacaagacggcaaattaattaaagttttggaagcaaatcaccacaaaccaggtaagggtaatactgttatgcgtgtgaaattgcgtgacttacggactggttcaattgttgaaacaacaatgcgcccagaagttaaagttgaacaagcaatgattgacactaaagatgttcaatatttatatacacaagataacgtggctttcttcatggatcttgaaacatatgaacaatatgaaattcaaacttcagccattgaagcagaattgaaatacctattagaaaacatgaactgcaagattcaattcttcggttcagaagtcatcggtgttacgttaccaacaactgttaacttacgcgttgttgaaacacaaccttctattaaaggggcaacagttacaggttctggtaaaccagcaacaatggaaacaggcttagtggttagtgtgcctgatttcatcagtgctgatgaagtcttagaaattaacacccaagaaggcacatacgttaaacgtgcagcaaaataataaagttttttaattaatgtttaatgcaaaacagttcaccaattttggtgagctgttttttagatgcttgttattaattgcttgtgatttagctgattttttattaggaaatccaatagtgatttgacaagtaagcgcttcaccgttatagtgataatgtaaacgatagttatttaaagtggaggtattaataatgacgaagaaaataattctcgattgtgatcctgggcatgatgacgcagtcgcaatgatgcttgctcacgggaatcctgaaatcgatttgctagcggttacgacagttgctgctaatcaaacgttaactaaggtaacacgcaatgcattagctgttgcgacaatgattggtatgcatgatgtgccaattgccgctgggtgttcacgccccttgattgaagaaattaaggttgcagcagatatccacggtgaatctggactagacggcgttgttttgccaaaacccactgtcgaacttgaaaaaattcatgcagtcgatttaatcatcgatttaattatgagtcatccagctaaaacaattacgttggtgccaactggtgctttaacgaatattgcgatggcagcacgcaaagaacctaagattatcgaccgggttaaagaagtagtcctcatgggtggcggttaccacgaagctaatgcgagtgctgttgctgaatttaatattaagtttgatcctgaagccgctaagattgtcttcaatgcgggctggcaagtcacgatggttggcctagacttaacccatcaagccttagcgacacctgatattgtgtcagaaattaaggccatccatactgaaacatcggcatttgttgtcgatctattggccttcttccgcgatatgtacaagaagggccaaaacttcgatgctcctccagttcatgatccatgtgcggtagcctatgtgattgatccaaccgtcatgactactaaaaaagtcccagttgatattgaactcaacgggacattgacgcgcgggatgactgtcgctgatttcagctatccaatccctgaagattgccaaacatcagtcgctgttaaattagaccatgctaaattctggggtctagttgaagatgcgttgcggacgattggctaactttctaagtaacgggttacggttttaagaagataatcttttgacaataacgggttaacgcttttggcgctttccatacaaattagggcagcggtgtaagcgatctgtgttgttttttcccaacctaggttgtttaagcggctatcaactactgcggctgttaacgcggcactggcgccattattgttaacacgcttgattggaataccagcgattaatttagtgtttcgattatcaatataaaataatccagtatgaggcattagaacataaatatgttctatgcctttttttagtagctttttggcacttttttcagcagttttagcatcagtcacagatgagttagttagcattgcaagttctttatcagttgtcattaatgtatctattttagaaagtacgttttgtaatttataacttttattgagtgaaacagttttaacaaaaataggtactttgcaattgtcaaatagccagtcgattgtcttttcaggtaggttagtatcaataatacagtaagcggaagtattgattgtggctagtcgttcactaaggaaatcgggcgtgatatcgtcataaattcccatgtcatcgacacctacattcagggtgccatctggatcattgacgtaaagataagaagatgtacttttatcaggtattttttttgaatgctggatagcgagatgatttttttgagcatcttcttcaaatttttgcccattcagatcatcaccataaaccgtaataaaataatttggaactgcaagttttgttaaattatgggcaatattataaccagctccacctaaagaaaaagtgatatgcccaggattagaattttgttgaataagtgttgtatcggttaatcctaggatatcaatattaacgccaccaataacggttacaaaatttggctcgttaataatataacctttgccggcaatgtaaccttttttggtgaggttaaaaatatgggcagcgacgccagatcttgttaaaccgaatttatcggccagttcttgttgtgaaattaatggattttctttaattatttttaaaatttcttcttcgcgttttgtcatgctaatccagtccccatctaattagtaagtagcttaagtataggttattaactactgtaggtcaattttgataaacaaaagtttattttataaaaaagtgtttacaaatagttgtaagcgttttataatgaatttgcatacaggagataaagagacggaggtgtcgaaatggaagataaatatgttgtagtcgttggcgggttgaatatggatattgcaggtatgccaggcaaggattttattgaacgtgattctaatcctggtgaggttaacctatccgttggtggtgttggacaaaatattgcacataatctagccaatttaggtgtaccaacgtatctgatgacggtttacggagacgatcaatacggtgcaatattacatcgagaatgtgaaacaaataagatcaatttagattatgcagctgaaattaaaggcgctaatagttcaacctatctttatgtaactgatggctcaggagacatgttagcggcaattaatgatatgagtatcgttaataatattactcctgattttttaaaggaacgattagcggtaattaatcaggctactttatgtattgtggatgctaatattccacaagaatcaattgaatggttggcagatcatttgaaagtgccgatgtatgttgatccggtttcagttgctaaagcacgtcgttttgaaaacgttttaaataaaattgatacgtttaaacctaatgaaatggaagcagaacttctaactggaattaaaatatccgatgaaagctcagctaaaatggcagcagaatatttagttaaccaaggaattcgtcatgtttttatctcgcttggcgcacacggtattctatgtgcagatgaaagtcaaacagtactagtgccaattattaaggtaccaattataagttgtaatggtgctggggattgtagcatggcaaccattgcttgggcatattatcactttggtaaaaaggcttctttaaaagagattggtcaatatgcgcaagctgcttcaagtattacggtgggaagtgcttcagccgtttcatcacatttaactgcgcaaaatgttattgatcgttgtcgacaagcagtaaaaaattaatttttggaggatttactaatgattaaaaaacaaatttattcacttattacttatgatgaaagcgtaaaaacgatggaggcaggtgccgatcatattgggcttgtaccaatgcaagatggtggtgtaccagcgcatcgagtgccattagaaactgttgataaaatttttgctgaagccaaaagacgtggcgttgtaacagtggcaatcatgttgaataaagatcctaaagaaatgttagatattgcgaaacgggttcgtccagatatcctgcacattgctgggatggaatatactgcagatcaagcgtttagagatcaattgagagcggtttgcccggaaacagaattaatgcaagccgttttagtagatggaccggaagcggtggaacgtgctaaagaatatgcaaaattctcagattacttattaacagattctggtttagctgcagatacaggaattggtgctagtggattaacacatgactggtcaattgatgcggcaattgttgctaatgtagatattccagttattattgctggcggcttaggaccagataatgttgaagagtgtattaaggaaattaaaccttatggcgttgattcattaacaaagacaagtattaaatatgatggcggtcgtatggaaaaagatatcgataaggtgcgtgaattctgtgaaagagcagataaggctgctgcagaagttggcttataaaaattgaaaataatatggacaagttttaagacggtatcgctaaagaaaatggcaactgcgatcattggtgtatttttagtctgtgttggagtagcgattaataacaacacacaactaggtaatgatccggtaggaattatttatgatggtattcgacaagctgctcagctttcacatgcgcagttaggcgtggcttccaattatattaatactggtttgatcattattttgtttttctttggacggaaatatattaatgtcggaacacttatctatcttgtaccctatggcttttttatcagcataggtagttatctgtataccgtcgtttttgtaggtaatacgctatggatacgagggttagctggtctagttggttgttctttatattatttagggattagcctatttgttgctagtaacatcggtgtcgatccttttaacggattaatgttaacactccgggacaaaacaggctggagtattcgccgttcgaaaataacaatggatgttgttttgattattgctggcgttttgttgggtggtcggtttggtgcaatcacaattctgacggcattaacaacaggaccagcaattcaatatttaagccaattatttagccaattgttatacggtgagagaatttaggaggataaaatggattataaattagttcaaaagaccaaagtattagtaaccgatgatttacctaaaacgattttgagtattttgaaagaaacacaatataaaaagccattaattgttatggatagttttttaaaagaagttgcaattgtaaaaagattgcaagttaaattgacggagaacaatattcaattctctatctataataaagtcgtttctgatccgccaacaactgtggtggatgaaggtgctgaattttttaaggcgcaagattgtgatagtttaattgcaattggcggtggcagtgccattgatgttgctagaggaattaatatcgttcgtataaatggtggcaaaattagcgaatacgtcacagcaagtaacgaaataaaagattgccccggattgatagcagtaccaacaacttctggtacggggagtgaattatcgaatgcattaatcgttacggatacagaaaatcagaccaaattagcggtgttagcgaataacgcagttagtgaatttgcagttttgaaccctgaattagtaatgacattacctaaagggatgacaattgcaacgggcttagatgcattttcacacgcggcagaaggttatacatcaaccttagcgagtcctgtcacagatgcgatttgcgaaaaaattatgtatttactagtcaaatacttacctaaggtaattgaagatggacaggatcgagaagcacgtgaacgtgtgatggtcgctgctacactaggtggttggatgctaaataatgcagggacacatgctggtcattccgttgcacatgtgattggatctaagtaccatatgccccatggaatggcttgtgcttatgcgttgcctggggtacttcaatttattgcaccagttagaagtaaaaaagtaaaagaaattggtttgattttgggcgctgaataccccgcagatccaacagataccgaaatcggtagaattacggctattcaatatcgtgaatttagagataaagttcttgggatgaagccattcactgattttaatatctcagaagatgaattactaactaatatagaaagtgtcgttaatgaacgttttgcgggaaatacacctaagcaaattgatcaagagggcgcaatgatgttattgaaaaactttggctagataactgaaagtggaggttattatgagtatattaatggggatagtcggattagtctttatatttgcgattggttggttagtcagttccaaccgaaagaaaattagatataaacaaattggtattttattagttacccaatttgtgatttccttcctgtgtttacatacatcaggtggggttaaagtgttggcaggtatttctaatttctttagttggttaatggggcaagctgcaggtggcgtcgattttgtttttggtggcgttgtaattaagagtggcgcttcagtcttcttcctcaacgtattgatgccaattgtatttatttcggcgttagtcggcattttgaactatattaaggtcttaccatttattattaaatggttaggaaaaggcattaataaattatcaggaatgggtgaattagaaagttattttgcagtttcaacagctgttttggggcaacctgaagtttttctaacaattaaggaacgaattcctaatttatcaccacaacgtttatatacaatctgcgcatccgcaatgtcagcggtaagtgcggcaatgttggcttcttatatgaaaatggttcccggtaaatttgttgttgtcgctgttttcttaaatattttttcagcccttattatttcatgtattgttaatccgtatgaaccagaagtagaggatcaaaaaacgatagaagctcatctctccactgaaaaggaaccattcttccaagttttaggtaattatattgttgatggttttcaacttgccttaaccgtagcagcaatgttaattggatttgtatcattagtaacgtttttaaacaatacatttggctttttctttaatgtcactttcactgatattattggttgggtatttgcacctgtcgcatttgttattggtgtgccagctgacgatattgttaaggttggaagcttaatggccacgaagttaattacaaatgagtttgttgcaatggggaatttatcacagattgcacattccttgagtccaaaagcaacagccattatctcgacttatctagttagttttgcaaattttggaacgattggtattatttcaggatcaatcaaagcaattgatcagaaacaaggtgctgttgttgcgaaatttactatgaaattattgttaggtgctacaatggcttccatgctgactggtacgattgttggtatgtatttttaggaaagaaacatctcttaattttaataagagatgtttttttattttaatagaaaatggtatactatcgtatgtaaccgattgcataaaaatacagataaagagggcgtttaagcatgtataacgcaaaagaaacgcggtatgacgatatgatctaccggcgtgtcggccattctgggttgaaattacctgcaatttcattagggttatggcataactttggtgaaacagataaagtggctactcaaaaagaaattatttttggggcctttgatatgggcattacacattttgatttagcgaataattatggtccaccagccggtagcgcggaagaaaactttggtcggattttgcactcagacttgaagcaatatcgggatgaaatgattatttcgtctaaggcgggttattatatgtggcccggcccttacggtgaatggggttcaaaaaagaatttaatcgctagttgtgaccaatcattgcaacggatgcaattagattatgtcgatattttctatagtcatcgaccagatcctgagacgccgattgaagaaacggcgcgggcgttggatttattagtccatcaagggaaggctttatatatcggaatttccaattattccgctgaacaaacaaaagcgattaccaaaatttttagagaacttggcacaccatttattattcaccaaccacgttacaatatgttggatcggtggattgaagatggcttaaccgatgtcttggctgaagaaggtttaggcgcaattacgtttagcccattagctcaaggcatgttgacgaaccgttatttaaatgggattccagcggattcacgtgctgcccgtccagatagtccattcttatcacctgaaaaggtcgaccaaacaatcagcactgttcaagaactgaataaaattgcgcaacaacgtggtcaatcattggctgaaatggcgcttgcttggaacttgcaacaaccaaccgttgcgagtgtcttggtgggtgcttctagattgagtcaacttcaagatagtgtgcatgcgttagacaacttaacgtttgcacctgaagaattagcggccattcaaaaggtattaaaatagtaaaaaggcgttagggcagatgtaattttgccctaacgcctttttactattcaaatgtgcttattgaaactgacttctgcgcttagtgtcactcgtcaaaccgtttcaaacacactttcttttttattcagctgtttctgcagttgctgcgtttgcttggattttgccaagaatcgcacgtgagaatggtcccactacgattaattgaagtggtaaggcaacgataatgttcattgcccaagcgtgtctgtaagcaccgccgagatcgtttggaatcccaccttcgattaatacaccgaagagtgacatacatgtgaccataccaagaatcatcaaacatgaaattgttaaaatcatgactaatttattgtccttattaagtggtaagctgaatgcaatttttttagcgagtacgccgatcacgaaaacatcgaggatgaaagctacgatgaagccaggaatcaagccggtgattaaagcgacaaatgaaaaactcccgtgtaataataagttatagatactcattccaagtaccattgagaaacacattaatgttgtaaaaataataccttcttttttattggtaggcatatcaatttccttctttctgaaaagttaacagatataaccgtatcacataaaaaattttggcgtaagtttttttttcagaaaatgagaagtttcttcattttcaatttcgatcggaatttcaccgttatggacggcatggaaaatcgaaacgagtaacaatgcacagacaaaaatcagtgggaagcccgcaatcacacaaaccgcttgaacggtttggaaactaccgacgagtacaattccgagtgaaaataaaatgaaaatgacaacccaagccatccgattccaacggttaggttgttcgccaattttcaattcaagactagtaaatgacgaaacgatgaaggctgatgatgaaatggtcgtggctaggaaaatgaaacaagatagacagaaaatcgcgagcatgacaatcttccaaggaagtgtcgtaatgacggccgcgataacggcggcttggccttgtgtgttcaataaagtaacaaggtcaacttgaccggaactttgtaagaagagggcgtaaccgccgaggatggcgtaaaaactcatacaactaagcgcaccataagtggccatcccaagtagcacttggcgaatagtccggccacgagagatgcgggcaatgaacaagcccatcacaggcatgtaagataaccaccaaccccaataaaagagcatttcgtgttgggcgaaatggctatcagaaccagttgcgtttaaactgagttgcccaaatttaccaaatagatggaaaagattgtgaccttcagcaccaatcagatgacgggtggggccgattaataaaacgagtaataaaaagccaatcgcggtgtaaatatgccaagcgctcagtttcttgatccctttatttaacccagcgtagacggttaaagtgaagagaatgaataaaacaacgaacaaggctagttttaaccagatagtatctgaaaaaccagtcatcgtgctaaggactttagaaatgacggggatttccatcccaattgaagagccgattccgcccataatcccgaagacgacaatgaagtcgatgagttggcggagaaccttttgtaagtttgagggccttctaataaatcgatggcggcactcaagcgttgaacgcgtaaattcttaacatagagtgcatagccaatcgcaattgtggcggtggcaaaaatcatccaggccattggtccccagttaaactgaccgcagacgttagcgtagcggtaagccgctgctgaaaagggcttagcgccaaatggtggattttgtaagtattggagtggatccgtggtgctgagcattaagatgctggcatcaatcccagtggcaaaaaccatgctaccccattgaaaatcgttatattcaggtttttcgttaggttggcccaaacgaatccggccatagtgactacagcccaaccaaactaaaaagatgaagttaataatataaatacctatgtagagccattgggaatgggacgtcatcgtgtccaataattgcgaaatagagtgctggagtgtgtcacctcctaacattagaaatgcggagacaatcccgaacaataacatcgtggggataaagacgactttatcaacattcttacgctttaaaataatgttcctcctgtgtttgttaaagtctaagttgtttagtcagattaacttaatcctagcactatttacttttgagttcacgtacatcgccttcaacattgtctaggcgttcgttgataaccttatgctcacttctactagcaataaagtcttcacgtagggtagtttgcgaatcaaacaaccgttcaattcgctggctgctatccttcatactttgggcaatgtcttgcagccgatccgtaaaaggtttcatgatagattgtaaaattaatccgaacgctgttcgggcaaaaaagatcagcttcctttaaaatggtgtttaccacaaaaccattttttaggagctgatcttttgtctagtataacctattctgaacgaattaaaattgaaaccttttgtgagctaggactgaccaatatccaaatggctgagcggttaaaacgatctccgtctacgatttcttatgaattatctcgttgtcaaccttatcaagctgaattagcacaggccaacgctgaatataaacgggcgcattgtggccgaaaaactaaactgaatgccaaattaaagcaaaccattctaaaccatttacgtctaagctggtcaccagaagtgattgcgcatgagcttaaactagccactaaatctatttataattggctatatcaggggaaaattgaattctccttgagtgaactacctgaacatgggctacgccaacggcgtaaccttgacaaacgttctaaatataatcaatcattagggcgttcaattgaacaacgaccaattgtgattaaccaacgtaaccgcatcggtgattttgaaatagatacagtggttggacctcgtggacatagcaaggctgctttattaacgctaattgatcgcaaatcacgttttctttgggcttaccgattaaaagatcagacagcggcgactgttaatgaagccctaactatgtttctaacaacttttaagggaccggtacacacctttactgtcgatcgtggaactgagtttagcaatctagtgtcattttgaaccacaatacggtattcagacctattactgccatgcttacacgcccgctgaacgcggcagtaatgaacgattcaatcggaacttacgttatttttatcctaaggggacttgttttgagcacattagtgctcaagatttaacaacgacgttactcgaaattaaccaacgcccccttaaagtacttaactggcaaacaccttaccaagtgatgctgactaatttgtcaaaaaattcggattaaatttgcaatctacctaataacctaatttaaaactgttttaatgtttgcgaactcataaattccccaatcgctgagttctctaccgtagcccgaacttttgacaccaccgaagggtacttctgcttgctcatctagtacttgattaatcgccacttggccagtttcgattttggtagccaactgattcccatgcttcacatcagccgtataaatagcaccgcctagaccatgccgtgaatcgttagccatctttatcatttcgtcttctgaactaaaacgataaatttgggcgacagggccaaataattcctcatcgtacattggattattacgttccataccagttaatattatcggtgaaaattggaaaccagggccctcatcaacatttagattaccgtatagtattttagaaccaccagcaaccactttctctacttgttcttgcaatttttctttagcgctttgtgacgataatggtgctagagtggtttcttcattcagtggattaccaggctgataggtatcaaattccttttttactttgtctaagaattcatcgtaaattttgtcgctaactaagtagcgcttggctgccgtacaaacttgacctgcattagccagacgtgcttgggcagcgtccttcgcagctttgtcaatgtctgcgtcatctaatactgcaaatatatctgttccaccaagttctaaagttgttttcattaaatttttggtggccttagctgctaaattactacctgcttgttctgatccggtcaaagcaaagccttgtacacgtggatcatcaataattttgtcaatttgatcatgcgtagcaaaaatattagcaaaggcaccttcaggtataccaaccttttgacaagctttctcgaacgcttgcgctgcttgaggaacaatactagcatgctttaatatgacagggttccccaatatgaagttaggagcgaatacacgcattacctgagtaaatggaaaattccaaggttcaacagctaggacaattccaatacttgaaaattctacgtgggctgtagagcctaccgataatttatcgtaatttttgggttgtaaaaacgctggcccttgtgtagcaaaatatcgggcgtaatttacaattttattaacctcagtacgcgattcacctatcaactttcccatattagttgacgacaggcgagcataatcttctaggtttgcttcgaattctcccgccagtctattcaacaggtcagctctcttagcaaaatcaactcgttttgccttttgatagtaactttcagctttatctaaaagatcttcgatttctttatccgtagtatctgtaaattcctgaataacttccccattatacgggttagtagctgtatatgccatatattatatttcctccttcaaagggctagttcttacctacctcattaacttaaatgttagcagctaaaaaggaaaatgccaaaaaattagcctgggtaaaattataaaggttaaatttgaaaccaaatttgtagatagctcctacttttattttgacgcacaaagtccctggcccatgttatttgttagctagctatggttaagctaatttggctacgcccttaaattatttaactggtgtatttttatttgtataactctgctatagagactggatcactagtaatttacaagagtatgaccttaaatattgcctatgcccatgattatattgaagagttaattagtatactcgctacttgacattttcggtttttctccaagaatggaaaataattttttgacgttggtgaacgcatcttaaattcttttcatgctaaaacgtagtgagggcttgtaaggctactaaatgccaaaaagtggcttctgggtttattaaatcgccctgcgctaaggcatttagcagcttttggctccttgagtttccttatgtaatttgaaaatgttacaaatagaatcataatttttttaatataagccattttattttacaataaaattagcattaataatatatatggaggtaactgtatgaaaaatgacgaaagctataataattatcgttatgtcatcgttggtggtggtatggttgcaggatacgcagttaaagggatccgtcagagagatacaacgggctcaatcttagttatttcaaaagaggccgacgtcccatatgaaagaccagctctaagcaagaagttatggttagatgatgaatttacagaagaggacattaaaattggcgctgaaactttttcagaagtaaactttaaatttgatacttctgtcactaaaatcaatcggcaagataagctggctaaattggacgatgatacaatagtccattatgaaaaattactactggctacggggggtgaacccaagaggattaaaggaccagaagatccacatgtcctagcatttagggactggtcggattatcggaggttacgcaaatttagcggtaacggccaacatgtggttattattggtggtggttatattggtacagaactcgctgcttccttagcacaaaataatactgaggtgactgtgattttccctgaacaatctctgggtgaagggaaattccccgaaaaaattagagctgaatatgaagaagcattcaaggaaaatgacgtcgcaattttgagcggtaagaccgttgaatcttacgatcgaaaagatgaccagttaattgtgaagaccacagatggtgacaaaatcactgcggacacgattgttattggcctcggcatcaccccaaacatcgaattagctaagacaagtaaattagacttagcagatgatggtgtgaaagttgatgagcacctgcaaactagtgacccagcaatttgggctgcgggggacattgcttcctaccccgatcggattttggatcgccaacgtattgagcacgttgaccacgcacgattttcaggtgaattagttggccaaaacatggctggtgctgacttgccttaccaacataccccctatttctattcaatggttttcaatatttcttggcaggcaattggctcgattaacttagaattagagcaattatttgaccaacgagaaaatggaacgattgtttacttcttgaggggcaatcaattagcaggtgtcctagtatggaacgttgtagtggacttggatgacgttagaaacctgatcgctaacccacctgctgatgggaagctagtcggtttattgaaggaaaagtaaggtagagatcaatcgattaagcaccttgtccataaggctgagcaaggttaacaaaacctttactataataaatatcccgcaagccaaagtaaaactttagcttgcgggatattatcattattaatcatcaaagggccctttttctagataggcacttaacatccagatttttttgtcaatatcgattttaaaaggcaaattacaagtttaatccgaacaaacccggaaactttcaatggcagtctgttgatgatggatttttaatggtcgttgattaataagctcaagtgctgccaggatttcatcagtcgttatctggtcaaagttagtctttttcgggaaaaaccaacgtaaccgtcgattgaaatattcattggatccccgttcccatggtgaatacgggtgacaaaaataaactttaatctgatagtcttgttctatagatcgataatcggcaaactccttaccatggtcaacagttatagatttcacttgggaaccgaaggtccccataaactttccaaaggtatcatttaaggccttggcggtgcgattaggggctttgacagcccatagaagccgggttttacgttctacaaaagtgaccaaacatgctcgtgactgacctcggctagaaagtaccgtatcgactccccaatgaccaaaagctaatcgctgattgacagattttggtcgttgttcaatggaagtcccacttgtaaatgtgccacgatgctcattagctcggcgctgtcggacatttcgattaggtagatcagccaagttgaaaggtaaccagccaagcttaagccagttataaattgaagcggtgctcaggttaaaagctgtcgcaatcgcttctggtgaccaagttaaacgtaggtggttggtaattaaaattgtcaatgatggcgttagaattgaatggcgaccacaagcccgccttttatgatctgcgtcttgttgcgctaattcgggatcatagggtttgacccgatctaattcatagctaatagttgatttggcaacgcctaaggcgtcagccatatcttggtaagtatgatggccttcactgaccagttgagctagcgcaccacgttgaaaacgtgataaagtagacgtacccaaagtaatcactccttatagctggttggaattaactactaccattgtaagagattgctttgggcctttttttatttttgttcggattaattatagaatttgccataagtaaagaaaatagggcgccctattttcttttaataccgtatttcacacggtatcgaataaaggtcgtccgtttaatacctgtatttcgggacacatcaatgtcactcatgccagctcgataaagcttaaaagcatgttgcaaacggggatcatctttggcatattggggtttgcgcccatgatatttaccctgctgcttagctaaggcaatcccttgttgctggcgctcaatgattcgcttacgttcactttcggcctgatacttatagagttcaataatcaagttggtcatcagttgacgtaaatttgggtcagcaatccctgtcatggacggcaaatttaacacatctagggtggcacccttattttgaatggagttcatgatcttagtcaaatcatggttgtttctgcctaagcgatctaattcagtgaccattacaatatcaccctcacgaatataggccagcattttttgcagttctggccgattagtgttagccccacttaatttatccgtaaataatttatcaacgtcttttaaagccgataactgtcgatctaaatgttgctccttggaactcacacgcgcataaccgattttagccatttccaattctccttttggacagttctaatgaacacttgtaattcctagtatagcacagaaataaaaacggccactagggtataccttaacgatcaaagtttctttattataatcgactatgctagtattactaagtagataatctaaattttctaataaaacataattacggggcgataaaatgatccaagaaattatgaatacgcgtggtgctagttcgtcacaaaattaaaaaatcctaaattatagactaaaattgccagttcaatttttagttgaaagccaaaggcactccgcgttaagttagtttcaattccaaaatcactaactaaggtagaaaaatgcgattcaattgtgcgacgtgacgccttgagcgcgcgcttattatgttccttggcccccttcatattcgaacggtatggtgtccataacgtgtagcctaattgcttaaattcagcgccaagtcgcttgcctacataaccgacatcggccaaaacaattggacaaggacaatcatcaatcaagctaacggcaacttttgtatcatggaccgaagcggcagtcaccacataattcagaatgtagccatcagtggttactagcatgtgggttttaaacccatagaacgacatttgcttagtggcattgtagccaatattagcttgccccagcaaaaatacgtgctctaaatttacgtactggttcacacaatggattcggcaaactatcaatgattgcgatctgtccaggttgggctacttcacgcgtcaaaccagtacggatcgcattgaccacgggtaataattgtagtgcgcgacggttgaaccgtgaccgactaatggtgattttttgcggcataaaggcggtcatcaagcgccaaaaacggcgttgtgattggataccaagcgttgtttgtaaacacagtagcgccaacaatcgacagtcatcgattttaacgtgcgccacattacgccgttgcgtcacacaacgtgggcaatagcgctggtaaagtgactggcacagctgataaaaataatgatagttactttgtaattcgtgacgaatttgtttaaacttaggatggttcaacatcgttaggactccttttaagtttagtcacttatgagtctaactgtgttggacttttttgttaatttttttatattattacaaactagcaccacgcgtacgataactaaaattattgtataattggtctatattttaaaataagcaaaataaattgtttttccggctcgttgatgctactataagtaaatgcattaaaaagtaagcgctattttaaaaggagggcgaactggatgaactttttaaaaccgcacgttgcaactgaaaaagtaccaccagaaaaggtagatgcgacgtacaaaaaattacgactacaggtgtttattgggatttttgttggttatgcaggttattatttattacgcaataatttctcgttagtaattccgcaattaatggatgaaggtttcagcaagacccaattagggtttgttttctcagccgtttcaattgcatatgggatcagtaaatttgtgatgggaatcgtttctgatcatagtaacgcacggattttcttacctttagggctattattaactgcgctagttaatttagcatttggttttattccgttactgacttcgtcggttactgcaatgtttattttactttccttagtcggttggtttgagggaatggggtggccgccatcaggccgagttttggcgcactggtattcagtcagtgaacgtggtggccgtatggcagtttggaatgttgcgcataacgttggtggcgcgttaatggcgccgatcgcttctggtgggatcgcatttgccgcggtatatatgagtggcatggcatcttatcatggcgcgttcattattccggccattgctgggatcgtggttgccttggttgctttttggctaattcgtgatacaccggaatcggttggattgccgccgatcgaagaataccgcaatgattatcccaacgaagatcataagctgtatgaaactgagttatcgaccaagcaaattctatttaaatatgtgctgaataataaatgggtttgggtgatcgctgttgctaatatttttgtttattttgtgcgttacggcgtggaaaattgggcgccggcttatttgactgaggtgcggcatatcagtttgggtgcttctagctggtcctatttcttgtacgaaatagcgggtattccaggtacgatttttgctggctgggtatccgataagatttttaaaggtcgtcgtggtccagccggttttgtttttatgcttggggtgactgcttttacgattgtttactggcaagcgacttcggtgttttggatcaatatttccctagttatgatcggtttcttgatttacgggccggtaatgttgatcgggctacaggcacttgatttagtgcctaaaaaagcggctgggactgctgccggcttaactggactatttggttatctatttggttcggtaatggcaaacgcctttatgggtatgatcgttgaccattttggttgggcgacgggctttttgacgatcgtgttcgcagcgctatttgcgacagtattatttgcgacaacgtggaaagttcgtgggcaacaggtgactaaatagtggctggtgaaagcagcataactgcaagctttattggcatcaaagaatagtaaagattataattagtgcaaagtaaacatgggctaacgcctgttttccttgcactttttatttttcctggaggaaaccatcatggcttatcgacatcgtgctacccaattgtcatttcaatcctttaacaacggccttggtgggccactttcttccgacaatgagtgggttcaattagccgacatgctcccgtggcaacagctcgatgaagcctatcaacttctttttactgagatgggtggcctttttgtaaggcgagataccgccgtttgagaccattgagataagccgtcatattgacgggaatcgttggctctaagaactgtaacgtgtcatcaacgccttcacctaaggtactcatgagaaacgcgccatagccctcaaaaacgtcctgttgttcggtttcattaagtagatcaaggttgatcccactaacttccaaaatgccaacgagattaccggttttggtaacttcgtagttaccatacatacccaccaccaaactcatgtcatcaatggtctctttaccaccattgattttaggcggttggtaatcccaatcgagcttcgctgatttattggcggttttgctcttcttcaaacgcatttagttcacctcgcttcttcggttttaaataaaacagtttctgaccattggcatagcggcgtttcaacttaaagttatctcgcactttaatattcttccgcgccgcaactggcctaattgttaaaatagccatgacaatcgtcatggctaagacaacaatcactatttttatcaggactaagatcagaccatagggtgggatcgcaataaaaattaagcccactagtcctgccagcgccgcatagccaaaatccttcaaggtgtagtctttccagatcccgtaatctttatctacgttctctgggaagataaattcttttcctttcttcatttggcaggctcctttttaaattaagtgaataggctgtaaacccaaggtaatagccagataatcgctgccgctagggccactaaaccagccacccgaccaaccgcgtgataaacctctgatttctctcgcggatcgtctgcgtcaggcattcttttgataataataaatagcgcgacacaaatcccgactaaaacgaccaacccagttaaaataccttgaatcgtcttaccagcttgagttaacttgcttttaacttcgccgccgtccgccgccaaaacaacctgggcgttcatcagtcctaaataaatcgcagtagctccagttgttgctaacgcttttactttgctgaacttcatgttattcctccttcctatcgtcttctgatgttcgtaattgaatttgttctgcctgcgtttcttctggttcatgctgatagaacttgttcaattgttcctcagcaatttgctggcttggtaacggatcggtggctaatttgacgcgaccattttcacttgtggctaagtaatactctttttctgactgacctaattcttgggcctctaagacatgcaaattatgttcgtaacggcctagggcgttatcaacttctaagccatagaagcctaagaagccttccaggaaactctcaccaaaaaaggtcatttcacttttaatctgcttatattgatgagtcggtttatcacttaccaatttttcggtctttttagcattttgacggtcttgatggcgattaaaccagcccctaagctttaacggctcagtcttcaactggcgtttaacggtcttcttaatcattgcttgccggacttcgtcaattggctgaccgtcttgatctaaaattgcttgtaactgttttggatcagttaatacgtggtcatcatcaaccacaatcgccttttgatcatcatgaactagcttgccattaatgccttgccagctttctactttcattggatcacctcctcaaaaaaagcgcgttagggacgctaaacaactagctttcccctaacccgcccggtaaaatggattgttaggagggtgacacctagaatcgtaacttccaggtgctgatccccgttagcaacttcactgcttacgaggacgccctctttttttatgtggtttttaatccattcaatgccatcttcagatattaatttaactttgcccgtttccatgagcatttcacttggcaactcgttagggtgccgtcttaaccaaacactcacgtacgtactacctcgttcaagcttgagactagcttgagctaagctaaaccattcctgtttctttgtcacatgtgaatactcctttccctatattatgggttcattgtaccattaaatgagcacgttggtgcacttttgattttacatttagattacaagtgcatgcccccatcttcatgccggtttcgagtttggtgttgccgttgctttttcgtcatttcccactcagtctcctttaaaccttgcgcctgtttttgccgttggtaatcttcatcacgggcatatagagcggccatgattgcgtcactaaaggccgtctttaggtaatattctggactaactggcttgtagttcaatggttgataatgtgccagctgggattttcggtattgatcgtccttagcttgttgctcttttaactgtttttggattttctcaatctgactgttcttaatcgttggatcaactttacattcacccaaaaagagttgtttagtgccgtcatgctttaaaacccgttgtaagtgatgattctctaactgatctaagctaagctgtcccgacaagtaagatagtccttgttgatgttcttggggactgaacacctgtggtggatttgcttgccactgttcaattgtttcagcctgacatggctttaaaacaggatcatagtacatcacggctgtataggcttgttcctgttcaatcattggtaattcattaaaattgccgttaggaaaagctcttcttaaaacttcctggtattgggtttgaataacttgcttaacagccatgattgttcgcaaatctttgactgcgcgagtaatcttttgctgctcggttggtgaatacttttctagtagaccttgatcaacgtgttctagactttctaagctatcatcatgaatcatcagcgtatatttaagctcgattttgacttccttttcttgttgcattaatatcttccagccaacgtatggccgtttggtaaaggtcgataattgtcggaccaataaatcatcacgaatattcattaaacgttcgtttaattcactgcctttgaaaatcgtttgttcactattagtttctttaatcaattcccgtcgttcagccgcggttgtctgttcaaaatcaagctctggataaagttttttagtcgtgcgatcaactactttatttaagagttcatctgctttttttagtgaactttcttgttggttaatcgtcaataattgcttagtgacatcttcaccaacagcgtgcttaattaaggtactgtttttccaattaaatagcatgcgccgcttatcatctaaactttccaaactaatataagttttcagttcgtggcttaactctttgaccacttttttctcgttaaacgagaagtgtttacttaggctatccaagtggcctcgattaactactttctcctgcatatttttatagccagctttggacttacgatagttcttaacttgttgattaaatgcctttctttcatgccgtttgctattgattccctcgtgttgcattggtgtgtcagctattccctgttccacaaatgatttttcactgatccgatcaggaatgtttttttgctctaaagcctgatttacacttgccgcccaattgtaccgccattcagttattttttcttttttatcccaatcgaccatcagtatctttctactcttagggtacttgctagttccggtatatgttttgttgccattatcatctaaaatatattgctttttgctcttaattccccatgttccatctgaattaaacggccgattagttaacatcacatgagcgtgcggattatctgggtggtcgcgatgaattgccacgtcggctaccatgccctcatcaacaaaattttcttgcacatattttgtcagtaattctttctgttcggattcacttaattctaccggtaaagccacgttaaactcttttgcataccgtgagtttgatttacgatctttcttttcaacttcattccacaactgctctcgatcactcgcccattcaggtgaattttttggcgtcaaaataaagctttctggcatgatcgatcgggcataaaaatagtggcgaccttccttatcatcaaatagcttttcaccacttcgataagcggcactggcaatcgcacttcgtcctttaccagcactaatattactaaaactcatgtggaatattgccatgtcagtcaccgtcttcctttgattctatgggttttgactttgttgtcgccatcggcgacttctgatacgaagatttagcaaaatttaccctacaagaatttgatggggtgtaagtgcgcattgacttcgtttcactcggtcttctgattaccttaactttaatttagtgtatgactttcgcttcgctatttcaacttttatactttgatttaacgttctctgtatgatatagtgtcggtgattatttttaatacgattggagggatcattatgtctcaaagtaacttagaaaaacaagaagccaaattaaaacagcttaatcaaaagattaaagctgaaaaaaataaaattgaacagaatctcggtaagcaaatcattagatcagccaatttggattatgggacacttactactccacagattaaaatgattgctaaaaaagttgccgcctttttaaatcaagctcaaaataaccgataatagttaggtggtaatgactatgcctaatcaatatgaaaaactagttgagcaacaagcgcgtttaaaacaaaaaattgagcgagaagattttaaattacggcaatctaaatactacgaaaatcggcaagcccgcaaagcccgttctcgccgattaattcaaaaaggggctttgctagaaaaatactttcaagctgataatctctcggttgaacaaaccgaagagcttttaaaaatatttgccgattacgttaatgcccataaaccaaataaactcaaaaacgatcaacctaataactaggccgatcgtttttattttcaggattattttttggcttaacttctagattgtttttagcaaagtctttgagatggttttgggttcttttactaatctcgtcttcaactaatttaagttctaatttatccgttttttttagttgcttgtacatctggtttaattcattagcacttaattttttgtttgctcgaatttgtaatccttgaataccattatcatatgtccactgtttaattttagtcatgtcattagtctgataataattggcaattagttcgttccattgatcccacttatctaacggcacattgattaagcctgcaccaccgtcaatcataattttattagcacttaaagtcgccgtccttttgttcccgtcccaaaagatttgttggcgcatattatgatacatgacagtcaatgctttatcagtaatcgtcgttcgtggatcagccaagattttttgtaaaaaggattgttcttgtttttcgttaattaaaggtggttcaaaaaagtcttcactacctaaatcaactcctcctttcccttgccgtaattctcccggtattaaggcgtcttccgctgccacaatcttgttgatttgtttttccatggttaacgttaaaggggaattttgagcagtgatatattgccacccacgttttaaattaacaatcgtcaaaacatcttcaacaggtactcctgctacgctcataccgtccataatagtttgtgtttgtggtaaagtggtattaacgccttcaaaacgagcattagtatgcactaacttggtaaagtttgctcgggcaaaccgttggttttctgcagctgtgaatttatacttgtccatatatgttcgagttttagccatattttgtgcctcctttctatttcagtcactgattatttgacctgtccatgttaaatcacaaaatgcttttcgttgataatttgctcttggcgtttatctaagaggtaagtgtgtaacgcgtcaaacagcttgcgtttatcaggatctgggttagggttatgggctgtttgctcccaaatgtcttgaatatcgactgcccatgggtcagccagcaattgatcaattgtttcgacttctttgctggatttggtcatttaaaaagctcctttcacattcccttagttcagtcatcgccaatttagccactaaaggtgcctatttttgcttctaagcgattttaaagcgattttaatacaattatgcatgtagcacttaaaacggtttaaacgagctaatatgacgtttaattccaagaacgctcgttatcaatattttgttctttagggtgtttggccgcatattctctagctgcttgttggttccaccaaacaccaaataggttttgcatggtgccgtacaggtagttctcaacattcttgatatgtttctcatcgcttcttagggcattaaaatagcgtcttaatgttttggtcatcattttttttaaatcagggtcatctaatagaatccatacgcctaaatccttatgttctttttcaacagcatatttggcgtttaagataatgccaatgaagcgccgcatttgttgcggggtacggcaccaaaaactaagtagttgcacagcttcgggttctaagaaaaccggcaagccactgtcttcatcagttaagaagtcattagcatgatttatgagatcctgattttgtttttgaatttctgctggtgagaaattggctgtggaaaagtccaacttttgagtatctatattgtatctgattttgtctctttctttaggttctctatatagattaagtccattttttgaacttccgctcgtagcaagggtttgagagctgttgtcaacaaacttatgcggaagttcattttttgaacttccgctcgtagcaagggtttcaacggtctcccgcggaagttcattttttgaacttccgctcgtagcaagggtttgagagcttttttgaccaaattcgccgcgtaaatagacatcggttgctttcacatcgagcttggacagatataagcgattcggttcatttttcttagttttcgggttaaagcccatttgtttctgaacgagtaatccgattgattccagctctgcttttattttgatgacttttccctttgaacaattgaacaagtccattagttcttgattggtaaagataaagtagacgtgtccttcactatcaacccagttattgcgcaaagaatactctaatcggtcttttagtaccatataggctaatttagcgtcattgcttaaatgcttgtattgctcgccatacattaatacataccattaagtttttttaattgcaatataaattttaagaatttattttgcaattcacgaactaagtgacaaatgtggcgtgaaaatatagcgtattcatgctactacctccaatatttttgtaaatttaaactaaatgccgattaacgacaaattttaataaattaacaaatcatacaatttattaaccgctaacaattatgaatttagttaattaaatttttaacatgaaaataaagcttcttatgtttttcaaacgttgtatatacggtatttaaccctttttgacgaactcttgttcgctttgttcgtgtacatcatgacatagcagacaattaagttgcaacatgaaatttaataaaaattaccctgggtactaataattagcctgatagcgccttaaaagttactcccaggtgatagttgccccactagttttatatgctgttatggcacgtttactgcctagttgctcaaactgatcaaacatagtgctaaatacatagctatttaaatcctgtattgcacccaaccgtacttgttggacaattcgcattaaggcatcataaacaggttggtcgatgtcttcgtcttgtaaatcaaacaagctgctttgtatctgatgactgtttaatgcttgttttttggcacgtagaattgttttttgaacagtacaaaacaattcaaaatctccgtttgataagagttttaaggctaaaagttgttgtttagaaaagatattgtcgttttctaattgcacttcaaacagcgcagcgtcttgtagctgcttgatattttgaggactgtccgttagagtatctgtttttttagtatctgtatttaaggttttaagatattcagtgttattaatatcagtatcactagttaccgtttttcggtaatctagattactgtttttcagcaatctagatttatcaagggtttcaggctgtccatcattcatagatgttggtaaatcaatgtttacaacttcttctgcgagtggattttcagctgtttcaagttgatcgatgccataaatatcgttatcagtaatttccggtccaagtaaatacatacgatttgctttaccttgtcccatacgtttcataactaataattgggcctcagttaattcctttttgattgaagtgatttttgagtgtccgcaaccaagaatctgctctagttgttcgccagtgtaaataaaataaatattgccggctttatcgaaccaatggtttttgattgaaagttggaggcggtcagaaagaatggcgaaagcaagttttgcttcagcactcaattttttatatttgtcgtttgtcataaagaccttaggaacttggaagaatttaagtgcgtattcccgcttaatgttgtaatagttcagttgattatccatgttagatctccttatcaattaaaaagagcgaacccgcatttgcgagtccgctctagtgtttttagagtaggcaaatgcgagcctggttaaaccagaatctcttttgaaaagccgcacgacctacttttatgtatactcaaacaagcctttttatattgctattttgaacaaaatagcctataatcaaagacatagtttagaagaaattacagacaaataacttcttaaagttggtcatcacgaattccagttcgtggtggctttttttatttaatttaacaataagttattcgttgtgaaatgtaaagttaaaacatcttccaatgtaaacatgtatacattggaaggtacgataaatattttgtttacttgtattaatgtaaaaaagtaaatatgtatacatttttacacataataatacctataaataagcaatacacaacttttaatactaaagtaaacatgtatacattagtacaatagtacttgactatttgcttacatgtggtattgtatacatgtactaattaaaagggagcgtgaattttatgagcagtcgtgtaattacatttggtaatttcaaaggcggaactggaaagacaacaactagcacaatggtaggaattgaacttgcaagaagaaatttaaaaacgttattagtcgatcttgatcctcaagggaatgcaacaaacctttacttgaagacaaaagaaaacgttgacaacgaaatcgtatcatttaataaaacgttaatggctggtataaaagatcaagatttgagtcaaacaataattaatattttacctaaccttgatgtattaccatctagtgcagacttctcattatatccccgattcatggaaacagtaagtagcgattataatgaaagagtttggtacttttcgaaattaatgaaggaatttaaggaaaagtatgattatattttaattgacattccaccaacaatttcattgattacagacagtgcactatatgcttcagattattgtgtgattgttctacaaactcaggaaagatccttgcaaggggcagaagcatttattaactatatgcaagaacaagttattgatacatttaaggcaccaactctcgatctaattggaattcttccagtccttttaaaaaatggggctccagttgacaacagtactttagaggttgcaaaagagttatttggtagtgaaaatatttttgatattacaattaaaaatatggaacgacttaaacggtatgatgtgactggtgtaatgtttaaagatcagtttgatcatgcagtacagaatgtatatgaaaaagttacgactgaaatgattagtagaataggggctattgaaaatgggtagtttattaaattcaaatagagtaaaatcaaatagtttagaccgtggaaagcgtattgaaccagagaactctatgagcataaaagatttaagtaatccaggcgaacaaagtaagagcagtaagattgagagcgtgacttattacgcgaatgtaagaattaataaccatataaaaaataaagcggaggctctttcaatcattggtgttgccaagtcacaaaaggacgcaattgatcgtgctttggattcttttgtagagcagttaagcgatgatgagaaaagaagttttaaaaatcaattagcaacgctggaagcaaaagatgtaaaaatgaaatctgaaaagtaaaaaaatactaatgtatacattagtatttttttgtagatatactgatgaataaacatctagtatctgttcacatgtaaaaatgtatacaattttacatgtgagtcgcttgattagtatggaagtgcaataaacttaaacaaaaaaagcaaggtgtttgtacaccctgctaaaagtagaaatattataatttcctgtttggctgctaaatagcagtatttttattgctttattttttctttattgttgatagcaaattttatttcttcagggaaaagctcgggatagttctttagaagtctaccaatttcaaatataattcccgctaaaaactcagttctattttgggctttaaatctatatgctcctatcctagtatttggtacataaatttctgaacagttgtgccataattaataaaacaagataggagcattccaatgaaacgatatcaagatgattttaaagccagcattgtgaagatgcatcgtgaagagaaaagatctattcgctcgctttccgaggaatacggtgtttctccagccgcaattcataactgggttaaaggcgctaaatcagttgagctagaagacggtactgaagtaacgtccaaagaattcaaacaacttcaaaaggaaaatcagcgattaaaggaggaactcgaaattttaaaagctgcggcggtgttactgggaaagcattaggacgaattaattgccttgtcttcatagaagatcagttattgcaataccgcttatcaattattctttcggcactgaaattaccgcgcagcacctattaccattggaaaagatatcaacctagtcaacacgaacgtgttgataatcaactcaaagaaaaaattaaattgatttgggaaaataattatcgtgcctatggttatccacgaataacgatggtgcttcgcaagtcaggcatctgtgttgggtcaaaacgaattttacgattaatgagggaaatggagattcactctttaatgaatcggcgatttaaaaaacctggcactcatgtggatcattcacaacgccccaatttaatcaagcaccagcccaatgcaaggatatggcgtgctgacattacttatttggaattacgtccaggaacctgggtttatctcagttctatttacgaaccaaaggttcatcaagttcttgctttcaagattggtcgtcagatggaggcgacgttagttgtagaaacgattaatcaggcgcttgaatatcatcaaaagccacaatattttcactctgacatgggttcacagtacaccagcaacgaagttgaaactttacttgaacggcatcagattagccactcatactcaaaacaaggttatccttatgataatgggccaattgaagcttttcactcattgttgaagagagagtttgcctttcaaacaactttttccaattttgaggacttggtaatccgaacctcaaattacatcagttggtttaattccgacagaattagaacgagtgtttagaaaaagatgtgccatttattgacataggagcaatatggattagtttcttcattctcggaaaatatgtggtaaaagtaaataccatcataattcacatgatcgtacacgtgttcaatattcataatacgctcgattgaagtctctcccacacctttaagtttagctgatagttgtgagtgatttcctctttcacacaaagcaatacctagtggatagaaatatacatttataacattgccattactttcttcgattgaaaaaggattatttgaattggcaatatatttaatactagaagaaattcttttgtagttccatggaaataatactaaaggaagtgtagataatgttggagtatatttcgtattggaagtaaattttcctaggtaatattttttgtcttcatcttttaactctaaattaaggtatatttcttcaaataattttttagcattgtgttcgttcctaacctcaaaaatctgaagaagatagtctgaaaattcggtactactgtgatcataagcagtgaatgaagtctctaatgtgactaaatcagttaaatgttttagtaaaacgaatatagatgttttatcaacggtttggctgcgcctggtatcttgcaaaattttggaagcttcagttatgaaattgtcgaatacttttttattagtatagccgggtgtgttttcaggggtgggaaagggcttatatttttttctaaatagcttcatgttgattctgtaactacctttctgatgtagagagattttctatttggatttggtgaattattctaaaaagagtagcttttgaggtattaaaggctgcaattgtttctttgattgaatggtttttataatactcatagatagcttgttcatgggggccaatcctacgtcttggacggccctctctatagtttagattgtgtttttttgaatactcttttcctgcttgagtacgttctacaatcatatcgcgttccatttcagcgactgatagaagggttcgaacaatcattttacccattggtgtattttcaatagtccctagattgagaactttaatactaatattttgttctagcagtggttcaatactatttaaggcttcgcgtgtgtttctggcaaagcgatcaagctttgtaataaccaaagtatcaccattcgagattgtatttaatagtagatcaaaaataggtcggtgagttgttgtgcctgtaaatttttcagaataaatattttgaggattaacaccagcgtcgacaagttgagcaacttgttcttctaaattttgacttgaagttgaaacccgggcataaccataaattttaaccaaaaatatcactcttttctgagactaagaatatgagactctacaaatcccagtatagcacgcttttaaataagtctcaaaaactgtacagtttttgagacactattttaaattatatttatttttgacaaaaacattttgaaagcatattatatagataaacatcaatgtatgggaggtgtatacatgaactatacccaactggctaaaatttttaaggctttatccgataaaaatcgagttaaaatcgttgatttattatctgctggggaaaaatgtgcttgtgatttattagatcaatttgaattttcacagccaacactttcgcaccacatgaaagtcttaattgaggcaaatattgtcatagcccgaaaatctggcaagtggcaacattactcattaaatgttgattttgtagacagctttgatgaacagattaaatcattgttattagaaaaaatagctaattaggctatatttttttatacaataaatagatacatttaaatgtgttgatatgatattggaggagtttattatgaaaaaagtagaattatttgaagcagcactatgttgtaatactggtgtttgtggtccaagtgtcgataaaaatttaatgttaatgactgctgcatttaataccatggttaaaaatactgatacctttgatgcttatcgctataacctaaatagtacgccggacgcatttgctcaaaatccggatattttagcgcttattcaacaagaaggtaatgctgttttaccaattttacgtgttgataacgtcattgttaaatcgggtgactacccaactttggcggaactatcagaatttaccggtgcctattttgttgaacaatcttctaatgcttgctgtggtgacaatacaactaattgctgtgaataataaactaaaaaggatggtttactgatgaattttaacttatataatccgaatgaagtgctcgacacaaaatacttattcttcacgggaaaaggcggcgttggcaaaacaacctcagcttgcgcaactgccatccagctggctgacaatggtcgacgggtcatgttagttagtactgatccagctagtaatttacaagatgtttttcaacgagaactaacaaaccaagcaactcaaatcgaagaagtcccaggtttaagtgttgctaattttgatccagtcacggctgctgaagactataaagaatcggtaatcgcaccttatcgtggtgttttacctgaatctgcaattgaaaatatggcagaacagctatccgggtcttgtaccgttgaaattgccgcatttaatgaatttgctaatttcttaaccagtccagatgtcgccaacagcttcgatacaatcattttcgatactgcccctactggtcacacactccgtttgttacaactaccatcagcttggagtggctacttagatgaaaatcaacaaggtgcttcttgcttaggtcaattagcaggtatgggtgaccgcaaggctgtttatgaaaaagcgatggcaactctaaatgatgatacgctaacaaccctcataatggttacctgtccacagcttgccccgttacttgaggccgatcgcgcttcaactgagcttaaaaatctcggcattaccaatcaaaaattaattttaaatggtgtttttgaaacagccaccgacgctgtctctcaaattttctacgaccgtcaacaagctgatttggtccggatgcctgatactttaaaacaacttaaaagttatcaaattcccttacgggcttacaatattgctgggattgataatgttagaaacttattaaagaagtcacaaccgattactaaaattacgaataatagggacaccaatctacccgaatttggtttaatgattgatgatttcgtcaatactaacaagaaacttattttcacgatgggtaaaggcggtgttggtaaaacttcaattgccattaaaatcgcaactgaactcgctaaacgtggtaaacgtgttcatcttgcatcaactgatccagccgatcatatctccgaaatattaactgacactaccaatattaaattaagtcacattgatgaagcccaagaattaaaacattatcaaaatgaagtgattgctaaagctgctttgacgatgtcaccagctgatgttgattatgtcaaagaagatttacaatcgccttgtactcaagaaattgcagtctttcgcgcttttgcagaattagtagccgacgatgattgtgatattgccgtcattgatactgcaccaaccgggcatacattactcctattagattccagccaaagctatgccaaggaagtagaacgagcgtctggagacgttcctgaatcaatcgtcaatttactaccaaaactccaagacgctagacaaacggaagtggtcatggtcactttaccagagacaactccggtctatgaatcaatgcgcttagctgatgatttggatcgcgctaatacggcccattcttggtgggttattaatcaaagtttattagccacgcacactaataatccaattctagcatcacgtgcaaacaacgaaactgcttggattaataaggttgatcaattgtctgccgggcaatacaacgtcattagctggcaagcataaattttaattgagaaggcgaacggctttctcgatacataggaggatattatgcaagttacatttgcagttagcatttttttattaacacttttatttgttatttggcaacctaagggcttatcaattggctggtcagccatggtaggagctggtttggccctactatttagagttgtaacgcttaaagatgtttggacggttacgggtattgtttggaacgcaacattatcatttatcgccattatcatgatttcgctaattcttgataaagttggcttctttgaatggtgtgcgctacacatggctagaattgctgatggccatggcattcgcatgtttgttttaatctcagtcttaggggcctttgtttctgcactctttgctaacgatggtgccgcactaatcttgacacccattgttttagcgatggtccgggccctaaactttgatgagaaaaaggtctttccattcattatcgctagtggttttatcgctgatgcgacttcattacctttagttgtcagtaatttagtcaacattgtttctgctgacttttttggtattagtttctcgacatatgcattgcacatgttaatcccaacattgttttcactcgtggctagcattatcgttctatacctttatttcagaaaagcattaccacgacactatgatgtttctcaagttgctgaccctaaaacggcgattactgatctattcttattcaaattttcttggatcgttttgatcactctattagcgggctatttcattggtagttttttaaagattcccgtctctttcatcgcgattacaattgctgccatcttcttgctagtcgctaatcgtagtgctgtgattgaaaccaaagcaattattaagggtgctccttggaatattgtcttcttttcaatcggcatgtacgttgttgtttatggactacaaaatgccgggatcaccactttaatcgcatctgctattacgtacattgcccaaaaagggctcttcattggcacagttggtatgggctttattgcagcgattctatcgtccttaatgaataacatgccaaccgttatgattaatgctttatcaattgatcaggttcaggcttctgaactcgtgcataaaggcctgatatatgccaacgtaattggttctgacttagggcccaagatcaccccgattggctcacttgcaaccttattatggttacacgttttagcccaaaaaaatgtcaaaattagttggggacaatacttcaagattgggattaccatcacgattccagttctatttattacgttgtgtggattgtatttatcattactattattaggttaggtggataatatgaaaatcgtcgttatcggttctgttgcggcaggtaccagtgtcgcggctaaggctcgacgaaacaatgaaaagaatgaaattacagtttatgagaaaggaaaagatatttcttattctgtatgtggtatgccattctatctgggtggtgaaatatcagacttagaaacgctaattcctcgcgatactaactggtttaagaagagattcaacgttgatatttttgtgggaatcgaagtcgtttcaattgatgaagtaaaccaaaagctacgactcaaaaatctaacaacaggtgaattatttgaagactattatgacaaattagttttagcaactggtgctacaccacgaattatcgctcccttcaatttaaattatcaaaatatgtttactatgcataatatggcagatacccgggctattgataactacttaaagactaatagttgtcagaatgttgttatatttggaactggttatgtggggcttgaaatgatggaacagcttaaacatcgtggtcttaacgttactttaatacaacgtagttctcaaattatgaccaactatgatggtgaaatggcttaccgggcggaactaatcattttggaaaatggtgtaaacattattaaaaacgttactactaaaaaaatcattgaaaaggacgatatcattcatacaattgttctcaatgatggtacacaaattccaactgatttagttattctggcgactggtgtagtcccacaaacaagtcttgtagaccacatgaacatcgctaaaggtccgtcaggggcactaaaagtgtcagctgatatggcaacttcaattccaaatatttatgctgtcggcgatatcgcagaaagcttctcggtaatagacgggtcacccttataccgaccaatggggtcaaccgccaacaaaatgggacgaattgctggtgatgctattactggtggtcagctcagacatcgtggtgtgttaggaaccggaattgtccgtttattcgatgtgactgtcgctcaaactggattcactgaaaaaattgctaacgctaaggggtatgatgttgaggtattatataatatcaagcctggtcatgctgactacttaaatggtactgaaaatattattaaagcaattgcagataaaaaaactggtaagctattgggtgttcaaattattggtaaagatggtgttgataaacgtattgatgtcttcgcaacagcaatgtctttcggtgctacggtttcagacctattccacttggatcttgcctatcagcctctatatgcaactacaaaagatccagtcctttataccggaatggctttagataacgctctaaatgggcgtcgtttactaacacccactaagttatatcagttgcttcaagacggtcaaaaaatacaaattatcgatgtccgttccaaaaaacaatatgatcaacagcatattgattcagctattagcatgccattaggtgatatccgtaaacgcataagcgagcttgataaaaatattttaactgtcacttattgtaacaaaggcgtaaccgggaatgccgctcagaatttacttatcaatttggggtttgcaaatgtctataatctgagtggtggccataagaattacaaaatggtcgtaaattatattaaatattcgaagattaagcactaaaaaggtgagtaagagatataaataaaagaaccagactgatatgcaattagtctggttcttttattgtatagtgcttgtataataatatagctaatcagtctcaatttggttaaatcaagagatgaaaaaataaactagttgaactgggttctaatctttctgagtaaaaaatattaataaagcaggtgtcacttactgttcagtttttatattttatttgtatacaattactccttattt

SEQ ID NO: 20 - DNA, 20 bp, synthetic construct
  source 1..20: mol_type = other DNA
  misc_feature 1..20: note = Description of sequence: Primer
agagtttgatcctggctcag

SEQ ID NO: 21 - DNA, 23 bp, synthetic construct
  source 1..23: mol_type = other DNA
  misc_feature 1..23: note = Description of sequence: Primer
cttgtgcgggcccccgtcaattc
